(19) United States
(12) Patent Application Publication
(10) Pub. No.: US 2020/0281973 A1
(43) Pub. Date: Sep. 10, 2020

(54) CELLS EXPRESSING MULTIPLE CHIMERIC ANTIGEN RECEPTOR (CAR) MOLECULES AND USES THEREFORE

(71) Applicants: Novartis AG, Basel (CH); The Trustees of the University of Pennsylvania, Philadelphia, PA (US)

(72) Inventor: Glenn Dranoff, Sudbury, MA (US)

(21) Appl. No.: 16/082,035

(22) PCT Filed: Mar. 3, 2017
(86) PCT No.: PCT/IB2017/051267

§ 371 Date: Sep. 4, 2018

Related U.S. Application Data
(60) Provisional application No. 62/303,466, filed on Mar. 4, 2016.

(51) Int. Cl. A61K 35/17; C07K 16/30; C07K 16/28; C07K 14/725; C07K 14/705; C12N 15/86; A61P 35/02

(52) U.S. Cl. CPC A61K 35/17; C07K 16/30; C07K 16/2878; C07K 16/2896; A61K 2039/505; C07K 14/7051; C07K 14/70521; C12N 15/86; A61P 35/02; C07K 16/2863

(57) ABSTRACT

The invention provides compositions and methods for treating diseases associated with expression of a tumor antigen as described herein by administration of a cell comprising a chimeric antigen receptor that binds a B-Cell antigen and a chimeric antigen receptor which binds a tumor antigen.

### RELATED APPLICATIONS

[0001] This application claims priority to U.S. Provisional patent application No. 62/303,466, filed Mar. 4, 2016. The entire contents of this application are incorporated herein by reference.

### SEQUENCE LISTING

[0002] The instant application contains a Sequence Listing which has been submitted electronically in ASCII format and is hereby incorporated by reference in its entirety. Said ASCII copy, created on Mar. 31, 2017, is named PAT057255-WO-PCT_SL.txt and is 1,001,738 bytes in size.

### FIELD OF THE INVENTION

[0003] The present disclosure relates generally to the use of immune effector cells (e.g., T cells, NK cells) engineered to express a Chimeric Antigen Receptor (CAR) that targets B cells and engineered to express a CAR that targets cells expressing a tumor antigen other than a B-Cell antigen, e.g., cells expressing a solid tumor antigen, myeloid tumor antigen, or cells expressing an antigen of a hematological tumor not of B-Cell origin, to treat a disease associated with expression of the tumor antigen.

### BACKGROUND OF THE INVENTION

[0004] Immunotherapy is a promising approach for the treatment of tumors. Immunotherapy with cells expressing chimeric antigen receptors (CARs) that target antigens expressed by the tumor has the advantage of targeted therapies that can invoke a rapid and sustained immune response against a tumor. CAR therapy has shown promising results in the clinic in treating some hematological cancers, such as B cell malignancies (see, e.g., Sadelain et al., Cancer Discovery 3:388-398 (2013)). The clinical results of the murine derived CART19 (i.e., “CTL019”) have shown promise in establishing complete remissions in patients suffering with CLL, as well as in childhood ALL (see, e.g., Kalos et al., Sci Transl Med 3:95ra73 (2011), Porter et al., NEJM 365:725-733 (2011), Grupp et al., NEJM 368:1509-1518 (2013)). However, studies exploring CAR therapy for treating other cancers have demonstrated variable efficacy, in part due to the limited persistence and proliferation of the CAR-expressing cells in vivo.

[0005] Thus, there exists a need for CAR cell therapies with enhanced efficacy, e.g., enhanced proliferation or prolonged persistence in a patient.

### SUMMARY OF THE INVENTION

[0006] The present disclosure features, at least in part, methods and compositions for treating a disease associated with expression of a tumor antigen, e.g., a cancer, in a subject using an immune effector cell (e.g., T cell) engineered to expresss a first chimeric antigen receptor (CAR) and a second CAR, wherein the antigen binding domain of said first CAR binds to a B-Cell antigen and the antigen binding domain of said second CAR binds to a tumor antigen other than a B-Cell antigen, e.g., to enhance the efficacy (e.g., the persistence and/or proliferation of the tumor antigen-targeting CAR-expressing immune effector cell in a patient) of the CAR-expressing immune effector cell therapy. Without wishing to be bound by theory, treatment with an immune effector cell expressing a CAR targeting a B-Cell antigen and a CAR targeting a tumor antigen enhances the anti tumor efficacy of the tumor antigen-targeting CAR-expressing immune effector cell in a subject, e.g., by one or more of: increasing the proliferation of said CAR-expressing immune effector cells and/or increasing the in vivo persistence of said CAR expressing immune effector cells, e.g., as compared to administering an immune effector cell expressing only the tumor-targeting CAR (e.g., not expressing the CAR targeting a B-Cell antigen). In aspects, the B-Cell antigen and the tumor antigen other than a B-Cell antigen are not expressed on the same cell (e.g., the B-Cell antigen is not expressed on the cell, e.g., tumor cell, which expresses the tumor antigen).

[0007] In an aspect, the invention provides, a cell that includes a first chimeric antigen receptor (CAR) and a second CAR, each of which includes an antigen binding domain, a transmembrane domain, and an intracellular signaling domain, wherein the antigen binding domain of said first CAR binds to a B-Cell antigen and the antigen binding domain of said second CAR binds to a tumor antigen other than a B-Cell antigen. In aspects of the invention, the B-Cell antigen targeted by the first CAR and the tumor antigen other than a B-Cell antigen targeted by the second CAR are not expressed on the same cell.

[0008] In embodiments, the second CAR binds: (a) a solid tumor antigen; (b) a myeloid tumor antigen; or (c) an antigen of a hematological tumor not of B-cell lineage.

[0009] In embodiments, the B-Cell antigen is selected from the group consisting of CD5, CD10, CD19, CD20, CD21, CD22, CD23, CD24, CD25, CD27, CD30, CD34, CD37, CD38, CD40, CD53, CD69, CD72, CD73, CD74, CD75, CD77, CD79a, CD79b, CD80, CD81, CD82, CD83, CD84, CD85, CD86, CD123, CD135, CD138, CD179, CD269, Flt3, ROR1, BCMA, FcRn5, FcRn2, CS-1, CXCR4, 5, 7, IL-7/3R, IL7/4/3R, and IL4R.

[0010] In embodiments, the B-Cell antigen is selected from the group consisting of CD19, CD20, CD22, FcRn5, FcRn2, BCMA, CS-1, and CD138

[0011] In one aspect, the cell includes a first chimeric antigen receptor that includes an antigen binding domain that binds a B-Cell antigen that is BCMA. In embodiments, the antigen binding domain of said first CAR includes a heavy chain complementary determining region 1 (HC CDR1), a heavy chain complementary determining region 2 (HC CDR2), and a heavy chain complementary determining region 3 (HC CDR3) of any heavy chain binding domain amino acid sequence listed in Table 12 or 13. In embodiments, the antigen binding domain of said first CAR further includes a light chain complementary determining region 1 (LC CDR1), a light chain complementary determining region 2 (LC CDR2), and a light chain complementary determining region 3 (LC CDR3) of any light chain binding domain amino acid sequence listed in Table 12 or 13. In embodiments, the antigen binding domain of said first CAR includes: (i) the amino acid sequence of any light chain variable region listed in Table 12 or 13; (ii) an amino acid sequence having at least one, two or three modifications but not more than 20 or 10 modifications of the amino acid sequence of any of the light chain variable regions provided in Table 12 or 13; or (iii) an amino acid sequence with 95-99% identity to the amino acid sequence of any of the light chain variable regions provided in Table 12 or 13. In embodiments, the antigen binding domain of said first CAR includes: (i) the amino acid sequence of any heavy chain variable region listed in Table 12 or 13; (ii) an amino acid sequence having at least one, two or three modifications but not more than 20 or 10 modifications of the amino acid sequence of any of the heavy chain variable regions provided in Table 12 or 13; or (iii) an amino acid sequence with 95-99% identity to the amino acid sequence of any of the heavy chain variable regions provided in Table 12 or 13. In embodiments, the antigen binding domain of said first CAR includes a polypeptide having the amino acid sequence of any light chain variable region listed in Table 12 or 13, and the amino acid sequence of any heavy chain variable region listed in Table 12 or 13. In embodiments, the antigen binding domain of said first CAR includes a polypeptide having a sequence of SEQ ID NO: 349; SEQ ID NO: 339, SEQ ID NO: 340; SEQ ID NO: 341; SEQ ID NO: 342; SEQ ID NO: 343; SEQ ID NO: 344, SEQ ID NO: 345, SEQ ID NO: 346, SEQ ID NO: 347, SEQ ID NO: 348, SEQ ID NO: 350, SEQ ID NO: 351, SEQ ID NO: 352, SEQ ID NO: 353, SEQ ID NO: 429, SEQ ID NO: 430, SEQ ID NO: 431, SEQ ID NO: 432, SEQ ID NO: 433, SEQ ID NO: 434, SEQ ID NO: 435, SEQ ID NO: 436, SEQ ID NO: 437, SEQ ID NO: 438, SEQ ID NO: 439, SEQ ID NO: 440, SEQ ID NO: 441, SEQ ID NO: 442, SEQ ID NO: 443, SEQ ID NO: 444, SEQ ID NO: 445, SEQ ID NO: 446, SEQ ID NO: 447, SEQ ID NO: 448, SEQ ID NO: 449, SEQ ID NO: 563, SEQ ID NO: 564, SEQ ID NO: 565 or SEQ ID NO: 566.

[0012] In another aspect, the cell includes a first chimeric antigen receptor that includes an antigen binding domain that binds a B-Cell antigen that is CD19. In embodiments, the antigen binding domain of said first CAR includes a heavy chain complementary determining region 1 (HC CDR1), a heavy chain complementary determining region 2 (HC CDR2), and a heavy chain complementary determining region 3 (HC CDR3) of any heavy chain binding domain amino acid sequence listed in Table 6, Table 7 or Table 9. In embodiments, the antigen binding domain of said first CAR further includes a light chain complementary determining region 1 (LC CDR1), a light chain complementary determining region 2 (LC CDR2), and a light chain complementary determining region 3 (LC CDR3) of any light chain binding domain amino acid sequence listed in Table 6, Table 8 or Table 9. In embodiments, the antigen binding domain of said first CAR includes: (i) the amino acid sequence of any light chain variable region listed in Table 6 or Table 9; (ii) an amino acid sequence having at least one, two or three modifications but not more than 20 or 10 modifications of the amino acid sequence of any of the light chain variable regions provided in Table 6 or Table 9; or (iii) an amino acid sequence with 95-99% identity to the amino acid sequence of any of the light chain variable regions provided in Table 6 or Table 9. In embodiments, the antigen binding domain of said first CAR includes: (i) the amino acid sequence of any heavy chain variable region listed in Table 6 or Table 9; (ii) an amino acid sequence having at least one, two or three modifications but not more than 20 or 10 modifications of the amino acid sequence of any of the heavy chain variable regions provided in Table 6 or Table 9; or (iii) an amino acid sequence with 95-99?/o identity to the amino acid sequence of any of the heavy chain variable regions provided in Table 6 or Table 9. In embodiments, the antigen binding domain of said first CAR includes a polypeptide having the amino acid sequence of any light chain variable region listed in Table 6 or Table 9, and the amino acid sequence of any heavy chain variable region listed in Table 6 or Table 9. In embodiments, the antigen binding domain of said first CAR includes a polypeptide having a sequence of SEQ ID NO: 83; SEQ ID NO: 84, SEQ ID NO: 85; SEQ ID NO: 86; SEQ ID NO: 87; SEQ ID NO: 88; SEQ ID NO: 89, SEQ ID NO: 90, SEQ ID NO: 91, SEQ ID NO: 92, SEQ ID NO: 93, SEQ ID NO: 94, SEQ ID NO: 95, or SEQ ID NO: 112.

[0013] In another aspect (including in any of the aforementioned aspects and embodiments), the cell includes a second CAR that includes an antigen binding domain that binds a myeloid tumor antigen, and wherein said myeloid tumor antigen is selected from the group consisting of CD123, CD33 and CLL-1.

[0014] In another aspect (including in any of the aforementioned aspects and embodiments), the cell includes a second CAR that includes an antigen binding domain that binds a T cell lymphoma antigen.

[0015] In another aspect (including in any of the aforementioned aspects and embodiments), the cell includes a second CAR that includes an antigen binding domain that binds a solid tumor antigen, e.g., wherein said solid tumor antigen is selected from the group consisting of EGFRvIII, mesothelin, GD2, Tn antigen, sTn antigen, Tn-O-Glycopeptides, sTn-O-Glycopeptides, PSMA, CD97, TAG72, CD44v6, CEA, EPCAM, KIT, IL-13Ra2, leguman, GD3, CD171, IL-11Ra, PSCA, MAD-CT-1, MAD-CT-2, VEGFR2, LewisY, CD24, PDGFR-beta, SSEA-4, folate receptor alpha, ERBBs (e.g., ERBB2), Her2/neu, MUC1, EGFR, NCAM, Ephrin B2, CAIX, LMP2, sLe, HMWMAA, o-acetyl-GD2, folate receptor beta, TEM1/CD248, TEM7R, FAP, Legumain, HPV E6 or E7, ML-IAP, CLDN6, TSHR, GPRC5D, ALK, Polysialic acid, Fos-related antigen, neutrophil elastase, TRP-2, CYP1B1, sperm protein 17, beta human chorionic gonadotropin, AFP, thyroglobulin, PLAC1, globoH, RAGE1, MN-CA IX, human telomerase reverse transcriptase, intestinal carboxyl esterase, mut hsp 70-2, NA-17, NY-BR-1, UPK2, HAVCR1, ADRB3, PANX3, NY-ESO-1, GPR20, Ly6k, OR51E2, TARP, GFRα4, and a peptide of any of these antigens presented on MHC. In embodiments, the solid tumor antigen is selected from the group consisting of CLDN6, mesothelin and EGFRvIII.

[0016] In one aspect, the cell includes a second chimeric antigen receptor that includes an antigen binding domain that binds EGFRvII. In embodiments, the antigen binding domain of said second CAR includes a heavy chain complementary determining region 1 (HC CDR1), a heavy chain complementary determining region 2 (HC CDR2), and a heavy chain complementary determining region 3 (HC CDR3) of any anti-EGFRvIII heavy chain binding domain amino acid sequence listed in Table 5. In embodiments, the antigen binding domain of said second CAR further includes a light chain complementary determining region 1 (LC CDR1), a light chain complementary determining region 2 (LC CDR2), and a light chain complementary determining region 3 (LC CDR3) of any anti-EGFRvIII light chain binding domain amino acid sequence listed in Table 5. In embodiments, the antigen binding domain of said second CAR includes: (i) the amino acid sequence of any anti-EGFRvII light chain variable region listed in Table 5; (ii) an amino acid sequence having at least one, two or three modifications but not more than 20 or 10 modifications of the amino acid sequence of any of the anti-EGFRvII light chain variable regions provided in Table 5; or (iii) an amino acid sequence with 95-99% identity to the amino acid sequence of any of the anti-EGFRvIII light chain variable regions provided in Table 5. In embodiments, the antigen binding domain of said second CAR includes: (i) the amino acid sequence of any anti-EGFRvIII heavy chain variable region listed in Table 5; (ii) an amino acid sequence having at least one, two or three modifications but not more than 20 or 10 modifications of the amino acid sequence of any of the anti-EGFRvIII heavy chain variable regions provided in Table 5; or (iii) an amino acid sequence with 95-99%/o identity to the amino acid sequence of any of the anti-EGFRvIII heavy chain variable regions provided in Table 5. In embodiments, the antigen binding domain of said second CAR includes a polypeptide having the amino acid sequence of any anti-EGFRvIII light chain variable region listed in Table 5, and the amino acid sequence of any anti-EGFRvIII heavy chain variable region listed in Table 5. In embodiments, the antigen binding domain of said second CAR includes a polypeptide having a sequence of any of SEQ ID NOS: 71-79.

[0017] In one aspect, the cell includes a second chimeric antigen receptor that includes an antigen binding domain that binds mesothelin. In embodiments, the antigen binding domain of said second CAR includes a heavy chain complementary determining region 1 (HC CDR1), a heavy chain complementary determining region 2 (HC CDR2), and a heavy chain complementary determining region 3 (HC CDR3) of any heavy chain binding domain amino acid sequence listed in Table 2 or 3. In embodiments, the antigen binding domain of said second CAR further includes a light chain complementary determining region 1 (LC CDR1), a light chain complementary determining region 2 (LC CDR2), and a light chain complementary determining region 3 (LC CDR3) of any light chain binding domain amino acid sequence listed in Table 2 or 4. In embodiments, the antigen binding domain of said second CAR includes: (i) the amino acid sequence of any light chain variable region listed in Table 2; (ii) an amino acid sequence having at least one, two or three modifications but not more than 20 or 10 modifications of the amino acid sequence of any of the light chain variable regions provided in Table 2; or (iii) an amino acid sequence with 95-99% identity to the amino acid sequence of any of the light chain variable regions provided in Table 2. In embodiments, the antigen binding domain of said second CAR includes: (i) the amino acid sequence of any heavy chain variable region listed in Table 2; (ii) an amino acid sequence having at least one, two or three modifications but not more than 20 or 10 modifications of the amino acid sequence of any of the heavy chain variable regions provided in Table 2; or (iii) an amino acid sequence with 95-99% identity to the amino acid sequence of any of the heavy chain variable regions provided in Table 2. In embodiments, the antigen binding domain of said second CAR includes a polypeptide having the amino acid sequence of any light chain variable region listed in Table 2, and the amino acid sequence of any heavy chain variable region listed in Table 2. In embodiments, the antigen binding domain of said second CAR includes a polypeptide having a sequence of any one of SEQ ID NOS: 46-70.

[0018] In embodiments, including in any of the aforementioned aspects and embodiments, the antigen binding domain of said first CAR is in the format of an scFv.

[0019] In embodiments, including in any of the aforementioned aspects and embodiments, the antigen binding domain of said second CAR is in the format of an scFv.

[0020] In embodiments, including in any of the aforementioned aspects and embodiments, the intracellular signaling domain of said first or said second CAR includes one or more primary signaling domains, e.g., as described herein.

[0021] In embodiments, including in any of the aforementioned aspects and embodiments, the intracellular signaling domains of said first CAR and said second CAR include a primary signaling domain, e.g., as described herein.

[0022] In embodiments, including in any of the aforementioned aspects and embodiments, the intracellular signaling domain of said first or said second CAR includes one or more costimulatory signaling domains, e.g., as described herein.

[0023] In embodiments, including in any of the aforementioned aspects and embodiments, the intracellular signaling domains of said first CAR and said second CAR include one or more costimulatory signaling domains, e.g., as described herein.

[0024] In embodiments, including in any of the aforementioned aspects and embodiments, the primary signaling domains include a CD3-zeta stimulatory domain, e.g., as described herein. In embodiments, including in any of the aforementioned aspects and embodiments, the costimulatory signaling domain is an intracellular domain of a costimulatory protein selected from the group consisting of CD27, CD28, 4-1BB (CD137), OX40, GITR, CD30, CD40, ICOS, BAFFR, HVEM, ICAM-1, lymphocyte function-associated antigen-1 (LFA-1), CD2, CDS, CD7, CD287, LIGHT, NKG2C, NKG2D, SLAMF7, NKp80, NKp30, NKp44, NKp46, CD160, B7-H3, and a ligand that specifically binds with CD83.

[0025] In one embodiment of any of the methods and compositions described herein, the transmembrane domain of the first CAR molecule, the second CAR molecule, or both the first CAR molecule and second CAR molecule comprises a transmembrane domain from a protein selected from the group consisting of the alpha, beta or zeta chain of the T-cell receptor, CD28, CD3 epsilon, CD45, CD4, CD5, CD8, CD9, CD16, CD22, CD33, CD37, CD64, CD80, CD86, CD134, CD137 and CD154. In some embodiments, the transmembrane domain of the first CAR, the second CAR, or both the first CAR and second CAR comprises the amino acid sequence of SEQ ID NO: 12, an amino acid sequence comprises at least one, two or three modifications but not more than 20, 10 or 5 modifications of the amino acid sequence of SEQ ID NO: 12, or a sequence with 95-99% identity to the amino acid sequence of SEQ ID NO: 12.

[0026] In embodiments, the transmembrane domains of the first CAR molecule and second CAR molecule are the same. In other embodiments, the transmembrane domains of the first CAR molecule and second CAR molecule are different.

[0027] In one embodiment of any of the methods and compositions described herein, the antigen binding domain of the first CAR molecule, the antigen binding domain of the second CAR molecule, or the antigen binding domain of both the first CAR molecule and the second CAR molecule is connected to a transmembrane domain by a hinge region. In some embodiments, the hinge region comprises SEQ ID NO:4, or a sequence with 95-99% identity thereof.

[0028] In one embodiment of any of the methods and compositions described herein, the intracellular signaling domain of the first CAR molecule, the second CAR molecule or both the first CAR molecule and second CAR molecule comprises a costimulatory signaling domain comprising a functional signaling domain obtained from a protein selected from the group consisting of a MHC class I molecule, a TNF receptor protein, an Immunoglobulin-like protein, a cytokine receptor, an integrin, a signaling lymphocytic activation molecule (SLAM protein), an activating NK cell receptor, BTLA, a Toll ligand receptor, OX40, CD2, CD7, CD27, CD28, CD30, CD40, CDS, ICAM-1, LFA-1 (CD11a/CD18), 4-1BB (CD137), B7-H3, CDS, ICAM-1, ICOS (CD278), GITR, BAFFR, LIGHT, HVEM (LIGHTR), KIRDS2, SLAMF7, NKp80 (KLRF1), NKp44, NKp30, NKp46, CD19, CD4, CD8alpha, CD8beta, IL2R beta, IL2R gamma, IL7R alpha, ITGA4, VLA1, CD49a, ITGA4, IA4, CD49D, ITGA6, VLA-6, CD49f, ITGAD, CD11d, ITGAE, CD103, ITGAL, CD11a, LFA-1, ITGAM, CD11b, ITGAX, CD11c, ITGB1, CD29, ITGB2, CD18, LFA-1, ITGB7, NKG2D, NKG2C, TNFR2, TRANCE/RANKL, DNAM1 (CD226), SLAMF4 (CD244, 2B4), CD84, CD96 (Tactile), CEACAM1, CRTAM, Ly9 (CD229), CD160 (BY55), PSGL1, CD100 (SEMA4D), CD69, SLAMF6 (NTB-A, Ly108), SLAM (SLAMF1, CD150, IPO-3), BLAME (SLAMF8), SELPLG (CD162), LTBR, LAT, GADS, SLP-76, PAG/Cbp, CD19a, and a ligand that specifically binds with CD83. In some embodiments, the costimulatory domain comprises the amino acid sequence of SEQ ID NO: 14, or an amino acid sequence having at least one, two or three modifications but not more than 20, 10 or 5 modifications of the amino acid sequence of SEQ ID NO: 14, or an amino acid sequence with 95-99% identity to the amino acid sequence of SEQ ID NO: 14. In some embodiments, the intracellular signaling domain comprises a functional signaling domain of 4-1BB and/or a functional signaling domain of CD3 zeta. In some embodiments, the intracellular signaling domain comprises the amino acid sequence of SEQ ID NO: 14 and/or the amino acid sequence of SEQ ID NO: 18 or SEQ ID NO:20; or an amino acid sequence having at least one, two or three modifications but not more than 20, 10 or 5 modifications of the amino acid sequence of SEQ ID NO:14 and/or the amino acid sequence of SEQ ID NO:18 or SEQ ID NO:20; or an amino acid sequence with 95-99% identity to the amino acid sequence of SEQ ID NO: 14 and/or the amino acid sequence of SEQ ID NO: 18 or SEQ ID NO:20. In some embodiments, the intracellular signaling domain comprises the amino acid sequence of SEQ ID NO: 14 and the amino acid sequence of SEQ ID NO: 18 or SEQ ID NO:20, wherein the amino acid sequences comprising the intracellular signaling domain are expressed in the same frame and as a single polypeptide chain.

[0029] In some embodiments, the first CAR molecule (e.g., the B-Cell antigen-targeting CAR molecule) comprises an intracellular signaling domain that comprises a costimulatory signaling domain, e.g., as described herein, but does not comprise a primary signaling domain. In other embodiments, the first CAR molecule (e.g., the B-Cell antigen-targeting CAR molecule) comprises an intracellular signaling domain that comprises a costimulatory signaling domain, e.g., as described herein, and a primary signaling domain, e.g., as described herein.

[0030] In some embodiments, the second CAR molecule (e.g., the tumor antigen-targeting CAR molecule) comprises an intracellular signaling domain that comprises a costimulatory signaling domain, e.g., as described herein, but does not comprise a primary signaling domain. In some embodiments, the second CAR molecule (e.g., the tumor antigen-targeting CAR molecule) comprises an intracellular signaling domain that comprises a primary signaling domain, e.g., as described herein, but does not comprise a costimulatory signaling domain. In other embodiments, the second CAR molecule (e.g., the tumor antigen-targeting CAR molecule) comprises an intracellular signaling domain that comprises a costimulatory signaling domain, e.g., as described herein, and a primary signaling domain, e.g., as described herein.

[0031] In a preferred embodiment, the first CAR molecule (e.g., the B-Cell antigen-targeting CAR molecule) comprises an intracellular signaling domain that comprises a costimulatory signaling domain, e.g., as described herein, but does not comprise a primary signaling domain, and the second CAR molecule (e.g., the tumor antigen-targeting CAR molecule), comprises an intracellular signaling domain that comprises a costimulatory signaling domain, e.g., as described herein, and a primary signaling domain, e.g., as described herein.

[0032] In another preferred embodiment, the first CAR molecule (e.g., the B-Cell antigen-targeting CAR molecule) comprises an intracellular signaling domain that comprises a costimulatory signaling domain, e.g., as described herein, and a primary signaling domain, e.g., as described herein, and the second CAR molecule (e.g., the tumor antigen-targeting CAR molecule), comprises an intracellular signaling domain that comprises a costimulatory signaling domain, e.g., as described herein, and a primary signaling domain, e.g., as described herein.

[0033] In one embodiment of any of the methods and compositions described herein, the first CAR molecule, the second CAR molecule, or both the first CAR molecule and the second CAR molecule further comprises a leader sequence comprising the amino acid sequence of SEQ ID NO:2.

[0034] In embodiments, including in any of the aforementioned aspects and embodiments, the costimulatory domain of both said first and said second CAR include an intracellular domain of 4-1BB, e.g., as described herein.

[0035] In embodiments, including in any of the aforementioned aspects and embodiments, the one or more of said costimulatory domains includes an intracellular domain of CD28, e.g., as described herein.

[0036] In embodiments, including in any of the aforementioned aspects and embodiments, the first or second CAR includes two costimulatory domains: (1) a 4-1BB costimulatory domain, e.g., as described herein; and (2) a CD28 costimulatory domain, e.g., as described herein.

[0037] In an aspect (including in any of the aforementioned aspects and embodiments that include a BCMA CAR) the antigen binding domain of said first CAR binds BCMA and the first CAR includes a polypeptide having an amino acid sequence selected from the group consisting of SEQ ID NO: 949, SEQ ID NO: 950, SEQ ID NO: 951, SEQ ID NO: 952, SEQ ID NO: 953, SEQ ID NO: 954, SEQ ID NO: 955, SEQ ID NO: 956, SEQ ID NO: 957, SEQ ID NO: 958, SEQ ID NO: 959, SEQ ID NO: 960, SEQ ID NO: 961, SEQ ID NO: 962, SEQ ID NO: 963, SEQ ID NO: 979, SEQ ID NO: 980, SEQ ID NO: 981, SEQ ID NO: 982, SEQ ID NO: 983, SEQ ID NO: 984, SEQ ID NO: 985, SEQ ID NO: 986, SEQ ID NO: 987, SEQ ID NO: 988, SEQ ID NO: 989, SEQ ID NO: 990, SEQ ID NO: 991, SEQ ID NO: 992, SEQ ID NO: 993, SEQ ID NO: 994, SEQ ID NO: 995, SEQ ID NO: 996, SEQ ID NO: 997, SEQ ID NO: 998, and SEQ ID NO: 999.

[0038] In an aspect (including in any of the aforementioned aspects and embodiments that include a CD19 CAR) the antigen binding domain of said first CAR binds CD19 and the first CAR includes a polypeptide having an amino acid sequence selected from the group consisting of SEQ ID NO: 269, SEQ ID NO: 270, SEQ ID NO: 271, SEQ ID NO: 272, SEQ ID NO: 273, SEQ ID NO: 274, SEQ ID NO: 275, SEQ ID NO: 276, SEQ ID NO: 277, SEQ ID NO: 278, SEQ ID NO: 279, SEQ ID NO: 280, and SEQ ID NO: 281.

[0039] In an aspect (including in any of the aforementioned aspects and embodiments that include a EGFRvIII CAR) the antigen binding domain of said second CAR binds EGFRvIII and the second CAR includes a polypeptide having an amino acid sequence selected from the group consisting of SEQ ID NO: 1043, SEQ ID NO: 1049, SEQ ID NO: 1055, SEQ ID NO: 1061, SEQ ID NO: 1067, SEQ ID NO: 1073, SEQ ID NO: 1079, SEQ ID NO: 1085, SEQ ID NO: 1090, and SEQ ID NO: 1096.

[0040] In an aspect (including in any of the aforementioned aspects and embodiments that include a mesothelin CAR) the antigen binding domain of said second CAR binds mesothelin and the second CAR includes a polypeptide having an amino acid sequence selected from the group consisting of SEQ ID NO: 282, SEQ ID NO: 283, SEQ ID NO: 284, SEQ ID NO: 285, SEQ ID NO: 286, SEQ ID NO: 287, SEQ ID NO: 288, SEQ ID NO: 289, SEQ ID NO: 290, SEQ ID NO: 291, SEQ ID NO: 292, SEQ ID NO: 293, SEQ ID NO: 294, SEQ ID NO: 295, SEQ ID NO: 296, SEQ ID NO: 297, SEQ ID NO: 298, SEQ ID NO: 299, SEQ ID NO: 300, SEQ ID NO: 301, SEQ ID NO: 302, SEQ ID NO: 303, SEQ ID NO: 304, SEQ ID NO: 305, and SEQ ID NO: 306.

[0041] In another aspect, the invention provides a cell which includes a CAR, e.g., a bispecific CAR (e.g., as described herein), which includes a first antigen binding domain that binds a B-Cell antigen, e.g., as described herein, a second antigen binding domain that binds a tumor antigen, e.g., as described herein, a transmembrane domain, e.g., as described herein, and an intracellular signaling domain, e.g., as described herein. In embodiments, the first antigen binding domain binds CD19, e.g., includes a CD19 binding domain described herein. In embodiments, the first antigen binding domain binds BCMA, e.g., includes a BCMA binding domain described herein. In embodiments, the second antigen biding domain binds a solid tumor antigen, a myeloid tumor antigen, or an antigen of a hematological tumor not of B-Cell lineage. In embodiments, the second antigen binding domain binds a solid tumor antigen, e.g., as described herein. In embodiments, the second antigen binding domain binds EGFRvIII (e.g., includes a EGFRvIII binding domain described herein). In other embodiments, the second antigen binding domain binds mesothelin (e.g., includes a mesothelin binding domain described herein). In embodiments, the CAR includes a first antigen binding domain to CD19, e.g., as described herein, and a second antigen binding domain to EGFRvIII, e.g., as described herein. In embodiments, the CAR includes a first antigen binding domain to BCMA, e.g., as described herein, and a second antigen binding domain to EGFRvIII, e.g., as described herein. In embodiments, the CAR includes a first antigen binding domain to CD19, e.g., as described herein, and a second antigen binding domain to mesothelin, e.g., as described herein. In embodiments, the CAR includes a first antigen binding domain to BCMA, e.g., as described herein, and a second antigen binding domain to mesothelin, e.g., as described herein. In embodiments, the CAR includes an intracellular signaling domain that includes a CD3z primary signaling domain, e.g., as described herein, and a 4-1BB costimulatory signaling domain, e.g., as described herein. In embodiments, the CAR includes an intracellular signaling domain that includes a CD3z primary signaling domain, e.g., as described herein, and a CD28 costimulatory signaling domain, e.g., as described herein.

[0042] In an aspect (including in any of the aforementioned aspects and embodiments), the cell is derived from a patient diagnosed with a myeloid tumor, or a hematological tumor not of B-Cell lineage.

[0043] In an aspect (including in any of the aforementioned aspects and embodiments), the patient is diagnosed with a myeloid tumor expressing an antigen selected from the group consisting of CD123, CD33 and CLL-1.

[0044] In an aspect (including in any of the aforementioned aspects and embodiments), the cell is derived from a patient diagnosed with a solid tumor. In embodiments, the patient is diagnosed with a solid tumor expressing an antigen selected from the group consisting of: EGFRvIII, mesothelin, GD2, Tn Ag, PSMA, TAG72, CD44v6, CEA, EPCAM, KIT, IL-13Ra2, GD3, CD171, IL-11Ra, PSCA, VEGFR2, LewisY, CD24, PDGFR-beta, SSEA-4, folate receptor alpha, ERBB2, Her2/neu, MUC1, EGFR, NCAM, Ephrin B2, CAIX, LMP2, sLe, HMWMAA, o-acetyl-GD2, folate receptor beta, TEM1/CD248, TEM7R, FAP, Legumain, HPV E6 or E7, CLDN6, TSHR, GPRC5D, ALK, Plysialic acid, PLAC1, globoH, NY-BR-1, UPK2, HAVCR1, ADRB3, PANX3, GPR20, Ly6k, OR51E2, TARP, and GFRα4.

[0045] In an aspect (including in any of the aforementioned aspects and embodiments), the cell is a human cell and is not derived from a patient diagnosed with a tumor.

[0046] In an aspect (including in any of the aforementioned aspects and embodiments), the cell is a T cell, a natural killer (NK) cell, a cytotoxic T lymphocyte (CTL), a tumor infiltrating lymphocyte (TIL), or a regulatory T cell.

[0047] In another aspect, the invention provides a method for stimulating a T cell-mediated immune response to a myeloid tumor cell in a mammal, the method including administering to a mammal an effective amount of a cell as described herein, e.g., a cell of any of the aforementioned aspects and embodiments.

[0048] In another aspect, the invention provides a method of providing an anti-myeloid tumor, immunity in a mammal, including administering to the mammal an effective amount of a cell as described herein, e.g., in any of the aforementioned aspects and embodiments.

[0049] In another aspect, the invention provides a method of treating a mammal having a disease associated with expression of a myeloid tumor antigen, said method including administering an effective amount of a cell as described herein, e.g., in any of the aforementioned aspects and embodiments.

[0050] In embodiments of the aspects involving a method for stimulating a T cell-mediated immune response to a myeloid tumor cell in a mammal, a method of providing an anti-myeloid tumor, immunity in a mammal and/or a method of treating a mammal having a disease associated with expression of a myeloid tumor antigen, the myeloid tumor expresses an antigen selected from the group consisting of CD123, CD33 and CLL-1. In embodiments, the mammal has a tumor characterized as acute myeloid leukemia (AML), acute lymphoblastic B-cell leukemia (B-cell acute lymphoid leukemia, BALL), acute lymphoblastic T-cell leukemia (T cell acute lymphoid leukemia (TALL)), B-cell prolymphocytic leukemia, chronic lymphocytic leukemia, chronic myeloid leukemia (CML), myelodysplastic syndrome, plasma cell myeloma, or a combination thereof.

[0051] In another aspect, the invention provides a method for stimulating a T cell-mediated immune response to a hematological tumor not of B-cell lineage, e.g., a T cell lymphoma tumor cell in a mammal, the method including administering to a mammal an effective amount of a cell as described herein, e.g., a cell of any of the aforementioned aspects and embodiments. In another aspect, the invention provides a method of providing immunity to an anti-hematological tumor not of B-cell lineage, e.g., an anti-T cell lymphoma tumor immunity, in a mammal, including administering to the mammal an effective amount of a cell as described herein, e.g., in any of the aforementioned aspects and embodiments.

[0052] In another aspect, the invention provides a method of treating a mammal having a disease associated with expression of an antigen of a hematological tumor not of B-cell lineage, e.g., a T cell lymphoma tumor antigen, said method including administering an effective amount of a cell as described herein, e.g., in any of the aforementioned aspects and embodiments.

[0053] In another aspect, the invention provides a method for stimulating a T cell-mediated immune response to a solid tumor cell in a mammal, the method including administering to a mammal an effective amount of a cell as described herein, e.g., a cell of any of the aforementioned aspects and embodiments.

[0054] In another aspect, the invention provides a method of providing an anti-solid tumor, immunity in a mammal, including administering to the mammal an effective amount of a cell as described herein, e.g., in any of the aforementioned aspects and embodiments.

[0055] In another aspect, the invention provides a method of treating a mammal having a disease associated with expression of a solid tumor antigen, said method including administering an effective amount of a cell as described herein, e.g., in any of the aforementioned aspects and embodiments.

[0056] In embodiments of the aspects involving a method for stimulating a T cell-mediated immune response to a solid tumor cell in a mammal, a method of providing an anti-solid tumor, immunity in a mammal and/or a method of treating a mammal having a disease associated with expression of a solid tumor antigen, the solid tumor cell expresses an antigen selected from the group consisting of: EGFRvIII, mesothelin, CS-1, GD2, Tn Ag, PSMA, TAG72, CD44v6, CEA, EPCAM, KIT, IL-13Ra2, GD3, CD171, IL-11Ra, PSCA, VEGFR2, LewisY, CD24, PDGFR-beta, SSEA-4, folate receptor alpha, ERBB2, Her2/neu, MUC1, EGFR, NCAM, Ephrin B2, CAIX, LMP2, sLe, HMWMAA, o-acetyl-GD2, folate receptor beta, TEM1/CD248, TEM7R, FAP, Legumain, HPV E6 or E7, CLDN6, TSHR, GPRC5D, ALK, Plysialic acid, PLAC1, globoH, NY-BR-1, UPK2, HAVCR1, ADRB3, PANX3, GPR20, Ly6k, OR51E2, TARP, and GFRα4, e.g., EGFRvIII or mesothelin. In embodiments, the mammal has a tumor characterized as glioblastoma, ovarian cancer, lung cancer, prostate cancer, colorectal cancer, pancreatic cancer, breast carcinoma, adenocarcinoma or mesothelioma.

[0057] In some embodiments, the solid tumor antigen is present in/on a mesothelioma (e.g., a malignant pleural mesothelioma), a lung cancer (e.g., non-small cell lung cancer, small cell lung cancer, squamous cell lung cancer, or large cell lung cancer), a pancreatic cancer (e.g., pancreatic ductal adenocarcinoma), an esophageal adenocarcinoma, an ovarian cancer, a breast cancer, a colorectal cancer, a bladder cancer or any combination thereof, or a metastasis of any of the aforementioned cancers. In one embodiment of any of the methods and compositions described herein, the disease associated with expression of the tumor antigen is a pancreatic cancer, e.g., a metastatic pancreatic ductal adenocarcinoma (PDA). In one embodiment, the pancreatic cancer is in a subject who has progressed on at least one prior standard therapy. In one embodiment, the disease is mesothelioma (e.g., malignant pleural mesothelioma), e.g., in a subject who has progressed on at least one prior standard therapy. In one embodiment, the disease is ovarian cancer, e.g., serous epithelial ovarian cancer, e.g., in a subject who has progressed after at least one prior regimen of standard therapy. In one embodiment, the disease is mesothelioma, malignant pleural mesothelioma, non-small cell lung cancer, small cell lung cancer, squamous cell lung cancer, or large cell lung cancer, pancreatic cancer, pancreatic ductal adenocarcinoma, pancreatic metastatic, esophageal adenocarcinoma, breast cancer, ovarian cancer, colorectal cancer and bladder cancer, or any combination thereof.

[0058] In embodiments, the cells are autologous to the treated mammal.

[0059] In embodiments, the cells are allogeneic to the treated mammal.

[0060] In embodiments, the mammal is a human.

[0061] In another aspect, the invention provides a method, including any of the aforementioned methods, wherein the administering of the cells of the invention, e.g., as described herein, results in partial or complete elimination of said tumor cells and, thereafter, continue to persist in said subject at a level greater than, or for a length of time longer than, otherwise identical cells that lack the first CAR.

[0062] In embodiments of the methods described herein, the mammal is administered a lymphodepleting therapy prior to, concurrently with, or after administration of said cells.

[0063] In embodiments of the methods described herein, mammal is not administered a lymphodepleting therapy prior to or concurrently with administration of said cells.

[0064] In embodiments of any of the methods and compositions described herein, the method can further comprise administering a lymphodepleting agent. In one embodiment, the lymphodepleting agent reduces the level of T cells, e.g., regulatory T cells, and/or regulatory B cells, as compared to the level prior to administration of the lymphodepleting agent. In one embodiment, the lymphodepleting agent comprises fludarabine, cyclophosphamide, corticosteroids, alemtuzumab, or total body irradiation (TBI), or a combination thereof.

[0065] Any of the methods and compositions described herein can further comprise administering an additional therapeutic agent that treats the disease associated with a tumor antigen. In one embodiment, the additional therapeutic agent is an anti-cancer therapeutic agent.

[0066] In another aspect, the invention provides a nucleic acid encoding the first CAR and the second CAR of any one of the aforementioned aspects and embodiments, e.g., as described herein. In embodiments, the sequence of said first CAR and said second CAR are separated by an independent ribosomal entry site, a promoter element, or a sequence encoding a T2A, P2A, E2A, or F2A element.

[0067] In another aspect, the invention provides a vector including the nucleic acid of the aforementioned aspect and embodiments, e.g., as described herein. In embodiments, the vector is a lentiviral vector.

[0068] In another aspect, the invention provides a composition including a first nucleic acid encoding the first CAR (e.g., a CAR comprising a binding domain to a B-Cell antigen, e.g., as described herein) of any one of the preceding aspects and embodiments, and a second nucleic acid encoding the second CAR (e.g., a CAR comprising a biding domain to a tumor antigen, e.g., as described herein) of any one of the preceding aspects and embodiments. In embodiments, the first and the second nucleic acids are included within separate vectors. In embodiments, the vectors are lentiviral vectors.

[0069] In another aspect, the invention provides a method of generating the cell of any one of the aforementioned aspects and embodiments, e.g., a cell as described herein, including introducing into said cell the nucleic acid of any one of the preceding nucleic acid aspects and embodiments, e.g., as described herein, the vector of any one of the preceding vector aspects and embodiments, e.g., as described herein, or the composition of any one of the preceding composition aspects and embodiments, e.g., as described herein.

[0070] In another aspect, the invention provides a method of generating the cell of any one of the preceding aspects and embodiments, including introducing into said cell a first vector including nucleic acid encoding the first CAR of any one of the aforementioned aspects and embodiments, e.g., as described herein, and introducing into said cells a second vector including nucleic acid encoding the second CAR of any one of the aforementioned aspects and embodiments, e.g., as described herein. In embodiments, the introduction of said first vector and said second vector is simultaneous. In embodiments, the introduction of said first vector and said second vector is sequential.

[0071] In another aspect, the invention provides a cell including nucleic acid encoding the first CAR of any one of the aforementioned aspects and embodiments, e.g., as described herein, and the second CAR of any one of the aforementioned aspects and embodiments, e.g., as described herein.

[0072] In another aspect, the invention provides a cell described herein, e.g., a cell expressing a CAR which binds a B-Cell antigen, e.g., described herein, and expressing a CAR which binds a tumor antigen other than a B-Cell antigen, e.g., described herein, for use as a medicament. In another aspect, the invention provides a cell described herein, e.g., a cell expressing a CAR which binds a B-Cell antigen, e.g., described herein, and expressing a CAR which binds a tumor antigen other than a B-Cell antigen, e.g., described herein, for use as a medicament for the treatment of a disease associated with the expression of the tumor antigen other than a B-Cell antigen. In another aspect, the invention provides a cell described herein, e.g., a cell expressing a CAR which binds a B-Cell antigen, e.g., described herein, and expressing a CAR which binds a tumor antigen other than a B-Cell antigen, e.g., described herein, for use as a medicament for the treatment of cancer, e.g., a cancer expressing the tumor antigen other than a B-Cell antigen. In another aspect, the invention provides a cell described herein, e.g., a cell expressing a CAR which binds a B-Cell antigen, e.g., described herein, and expressing a CAR which binds a tumor antigen other than a B-Cell antigen, e.g., described herein; a nucleic acid described herein; or a composition described herein; for use in the manufacture of a medicament.

[0073] Unless otherwise defined, all technical and scientific terms used herein have the same meaning as commonly understood by one of ordinary skill in the art to which this invention belongs. Although methods and materials similar or equivalent to those described herein can be used in the practice or testing of the present disclosure, suitable methods and materials are described below. All publications, patent applications, patents, and other references mentioned herein are incorporated by reference in their entirety. In addition, the materials, methods, and examples are illustrative only and not intended to be limiting. Headings, sub-headings or numbered or lettered elements, e.g., (a), (b), (i) etc, are presented merely for ease of reading. The use of headings or numbered or lettered elements in this document does not require the steps or elements be performed in alphabetical order or that the steps or elements are necessarily discrete from one another. Other features, objects, and advantages of the invention will be apparent from the description and drawings, and from the claims.

### BRIEF DESCRIPTION OF THE DRAWINGS

[0074] FIG. 1 shows a diagram of a nucleic acid construct for bicistronic expression of a B-cell antigen CAR and a solid tumor antigen CAR. The top construct encodes a CD19 CAR (B-cell antigen CAR) and an EGFRvII CAR (solid tumor CAR), separated by a P2A protease cleavage site. The bottom construct encodes a CD19 CAR (B-cell antigen CAR) and a Mesothelin CAR (solid tumor CAR), separated by a P2A protease cleavage site.

[0075] FIG. 2, shows a diagram of a set of nucleic acid constructs for expression of a B-cell antigen CAR and a solid tumor antigen CAR A first construct encodes a CD19 CAR (B-cell antigen CAR) and a second construct encodes a EGFRvIII CAR (solid tumor CAR). The constructs may be provided in separate vectors, e.g., separate lentiviral vectors. Cells are transfected with the set of constructs to express both the B-cell antigen CAR and the solid tumor antigen CAR

### DETAILED DESCRIPTION

[0076] Methods and compositions for treating a disease associated with expression of a tumor antigen, e.g., a cancer, in a subject using an immune effector cell (e.g., T cell) engineered to expresss a first chimeric antigen receptor (CAR) and a second CAR, wherein the antigen binding domain of said first CAR binds to a B-Cell antigen and the antigen binding domain of said second CAR binds to a tumor antigen other than a B-Cell antigen, e.g., to enhance the efficacy (e.g., the persistence and/or proliferation of the CAR-expressing immune effector cell in a patient) of the CAR-expressing immune effector cell therapy. Without wishing to be bound by theory, treatment with an immune effector cell expressing a CAR targeting a B-Cell antigen and a CAR targeting a tumor antigen enhances the anti tumor efficacy of the CAR-expressing immune effector cell in a subject, e.g., by one or more of: increasing the proliferation of said CAR-expressing immune effector cells and/or increasing the in vivo persistence of said CAR expressing immune effector cells, e.g., as compared to administering an immune effector cell expressing only the tumor-targeting CAR (e.g., not expressing the CAR targeting a B-Cell antigen).

### Definitions

[0077] Unless defined otherwise, all technical and scientific terms used herein have the same meaning as commonly understood by one of ordinary skill in the art to which the invention pertains.

[0078] The term “a” and “an” refers to one or to more than one (i.e., to at least one) of the grammatical object of the article. By way of example, “an element” means one element or more than one element.

[0079] The term “about” when referring to a measurable value such as an amount, a temporal duration, and the like, is meant to encompass variations of ±20% or in some instances ±10%, or in some instances ±5%, or in some instances ±1%, or in some instances ±0.1% from the specified value, as such variations are appropriate to perform the disclosed methods.

[0080] The term “Chimeric Antigen Receptor” or alternatively a “CAR” refers to a recombinant polypeptide construct comprising at least an extracellular antigen binding domain, a transmembrane domain and a cytoplasmic signaling domain (also referred to herein as “an intracellular signaling domain”) comprising a functional signaling domain derived from a stimulatory molecule as defined below. In some embodiments, the domains in the CAR polypeptide construct are in the same polypeptide chain, e.g., comprise a chimeric fusion protein. In some embodiments, the domains in the CAR polypeptide construct are not contiguous with each other, e.g., are in different polypeptide chains, e.g., as provided in an RCAR as described herein.

[0081] In one aspect, the stimulatory molecule is the zeta chain associated with the T cell receptor complex. In one aspect, the cytoplasmic signaling domain comprises a primary signaling domain (e.g., a primary signaling domain of CD3-zeta). In one aspect, the cytoplasmic signaling domain further comprises one or more functional signaling domains derived from at least one costimulatory molecule as defined below. In one aspect, the costimulatory molecule is chosen from 4-1BB (i.e., CD137), CD27, ICOS, and/or CD28. In one aspect, the CAR comprises a chimeric fusion protein comprising an extracellular antigen binding domain, a transmembrane domain and an intracellular signaling domain comprising a functional signaling domain derived from a stimulatory molecule. In one aspect, the CAR comprises a chimeric fusion protein comprising an extracellular antigen binding domain, a transmembrane domain and an intracellular signaling domain comprising a functional signaling domain derived from a co-stimulatory molecule and a functional signaling domain derived from a stimulatory molecule. In one aspect, the CAR comprises a chimeric fusion protein comprising an extracellular antigen binding domain, a transmembrane domain and an intracellular signaling domain comprising two functional signaling domains derived from one or more co-stimulatory molecule(s) and a functional signaling domain derived from a stimulatory molecule. In one aspect, the CAR comprises a chimeric fusion protein comprising an extracellular antigen binding domain, a transmembrane domain and an intracellular signaling domain comprising at least two functional signaling domains derived from one or more co-stimulatory molecule(s) and a functional signaling domain derived from a stimulatory molecule. In one aspect the CAR comprises an optional leader sequence at the amino-terminus (N-ter) of the CAR fusion protein. In one aspect, the CAR further comprises a leader sequence at the N-terminus of the extracellular antigen binding domain, wherein the leader sequence is optionally cleaved from the antigen recognition domain (e.g., a scFv) during cellular processing and localization of the CAR to the cellular membrane.

[0082] A CAR that comprises an antigen binding domain (e.g., a scFv, or TCR) that targets, e.g., binds to, a specific antigen X, such as those described herein, is also referred to as XCAR, X-CAR or X-targeting CAR. For example, a CAR that comprises an antigen binding domain that targets CD19 is referred to as CD19CAR. A CAR that comprises an antigen binding domain (e.g., a scFv or TCR) that targets a specific tumor antigen (TA), such as those described herein, is also referred to as TA CAR. A CAR that comprises an antigen binding domain (e.g., a scFv or TCR) that targets a specific B cell antigen (BCA), such as those described herein (e.g. in connection with the first CAR molecule of the compositions of the invention), is also referred to as BCA CAR

[0083] The term “signaling domain” refers to the functional portion of a protein which acts by transmitting information within the cell to regulate cellular activity via defined signaling pathways by generating second messengers or functioning as effectors by responding to such messengers. In some aspects, the signaling domain of the CAR described herein is derived from a stimulatory molecule or co-stimulatory molecule described herein, or is a synthesized or engineered signaling domain.

[0084] The term “antibody,” as used herein, refers to a protein, or polypeptide sequence derived from an immunoglobulin molecule which specifically binds with an antigen. Antibodies can be polyclonal or monoclonal, multiple or single chain, or intact immunoglobulins, and may be derived from natural sources or from recombinant sources. Antibodies can be tetramers of immunoglobulin molecules.

[0085] The term “antibody fragment” refers to at least one portion of an intact antibody, or recombinant variants thereof, and refers to the antigen binding domain, e.g., an antigenic determining variable region of an intact antibody, that is sufficient to confer recognition and specific binding of the antibody fragment to a target, such as an antigen. Examples of antibody fragments include, but are not limited to, Fab, Fab′, F(ab′)₂, and Fv fragments, scFv antibody fragments, linear antibodies, single domain antibodies such as sdAb (either VL or VH), camelid VHH domains, and multi-specific antibodies formed from antibody fragments such as a bivalent fragment comprising two Fab fragments linked by a disulfide brudge at the hinge region, and an isolated CDR or other epitope binding fragments of an antibody. An antigen binding fragment can also be incorporated into single domain antibodies, maxibodies, minibodies, nanobodies, intrabodies, diabodies, triabodies, tetrabodies, v-NAR and bis-scFv (see, e.g., Hollinger and Hudson, Nature Biotechnology 23:1126-1136, 2005). Antigen binding fragments can also be grafted into scaffolds based on polypeptides such as a fibronectin type I (Fn3) (see U.S. Pat. No. 6,703,199, which describes fibronectin polypeptide minibodies).

[0086] The term “scFv” refers to a fusion protein comprising at least one antibody fragment comprising a variable region of a light chain and at least one antibody fragment comprising a variable region of a heavy chain, wherein the light and heavy chain variable regions are contiguously linked via a short flexible polypeptide linker, and capable of being expressed as a single chain polypeptide, and wherein the scFv retains the specificity of the intact antibody from which it is derived. Unless specified, as used herein an scFv may have the VL and VH variable regions in either order, e.g., with respect to the N-terminal and C-terminal ends of the polypeptide, the scFv may comprise VL-linker-VH or may comprise VH-linker-VL.

[0087] The term “complementarity determining region” or “CDR,” as used herein, refers to the sequences of amino acids within antibody variable regions which confer antigen specificity and binding affinity. For example, in general, there are three CDRs in each heavy chain variable region (e.g., HCDR1, HCDR2, and HCDR3) and three CDRs in each light chain variable region (LCDR1, LCDR2, and LCDR3). The precise amino acid sequence boundaries of a given CDR can be determined using any of a number of well-known schemes, including those described by Kabat et al. (1991), “Sequences of Proteins of Immunological Interest,” 5th Ed. Public Health Service, National Institutes of Health, Bethesda, Md. (“Kabat” numbering scheme), Al-Lazikani et al., (1997) JMB 273,927-948 (“Chothia” numbering scheme), or a combination thereof. Under the Kabat numbering scheme, in some embodiments, the CDR amino acid residues in the heavy chain variable domain (VH) are numbered 31-35 (HCDR1), 50-65 (HCDR2), and 95-102 (HCDR3); and the CDR amino acid residues in the light chain variable domain (VL) are numbered 24-34 (LCDR1), 50-56 (LCDR2), and 89-97 (LCDR3). Under the Chothia numbering scheme, in some embodiments, the CDR amino acids in the VH are numbered 26-32 (HCDR1), 52-56 (HCDR2), and 95-102 (HCDR3); and the CDR amino acid residues in the VL are numbered 26-32 (LCDR1), 50-52 (LCDR2), and 91-96 (LCDR3). In a combined Kabat and Chothia numbering scheme, in some embodiments, the CDRs correspond to the amino acid residues that are part of a Kabat CDR, a Chothia CDR, or both. For instance, in some embodiments, the CDRs correspond to amino acid residues 26-35 (HCDR1), 50-65 (HCDR2), and 95-102 (HCDR3) in a VH, e.g., a mammalian VH, e.g., a human VH; and amino acid residues 24-34 (LCDR1), 50-56 (LCDR2), and 89-97 (LCDR3) in a VL, e.g., a mammalian VL, e.g., a human VL.

[0088] The portion of the CAR of the invention comprising an antibody or antibody fragment thereof may exist in a variety of forms where the antigen binding domain is expressed as part of a contiguous polypeptide chain including, for example, scFv antibody fragments, linear antibodies, single domain antibodies such as sdAb (either VL or VH), camelid VHH domains, a humanized antibody, a bispecific antibody, an antibody conjugate (Harlow et al., 1999, In: Using Antibodies: A Laboratory Manual, Cold Spring Harbor Laboratory Press, NY; Harlow et al., 1989, In: Antibodies: A Laboratory Manual, Cold Spring Harbor, N.Y.; Houston et al., 1988, Proc. Natl. Acad. Sci. USA 85:5879-5883; Bird et al., 1988, Science 242:423-426). In one aspect, the antigen binding domain of a CAR of the invention comprises an antibody fragment. In a further aspect, the CAR comprises an antibody fragment that comprises a scFv.

[0089] As used herein, the term “binding domain” or “antibody molecule” (also referred to herein as “anti-target (e.g., CD19) binding domain”) refers to a protein, e.g., an immunoglobulin chain or fragment thereof, comprising at least one immunoglobulin variable domain sequence. The term “binding domain” or “antibody molecule” encompasses antibodies and antibody fragments. In an embodiment, an antibody molecule is a multispecific antibody molecule, e.g., it comprises a plurality of immunoglobulin variable domain sequences, wherein a first immunoglobulin variable domain sequence of the plurality has binding specificity for a first epitope and a second immunoglobulin variable domain sequence of the plurality has binding specificity for a second epitope. In an embodiment, a multispecific antibody molecule is a bispecific antibody molecule. A bispecific antibody has specificity for no more than two antigens. A bispecific antibody molecule is characterized by a first immunoglobulin variable domain sequence which has binding specificity for a first epitope and a second immunoglobulin variable domain sequence that has binding specificity for a second epitope.

[0090] The term “antibody heavy chain,” refers to the larger of the two types of polypeptide chains present in antibody molecules in their naturally occurring conformations, and which normally determines the class to which the antibody belongs.

[0091] The term “antibody light chain,” refers to the smaller of the two types of polypeptide chains present in antibody molecules in their naturally occurring conformations. Kappa (κ) and lambda (λ) light chains refer to the two major antibody light chain isotypes.

[0092] The term “recombinant antibody” refers to an antibody which is generated using recombinant DNA technology, such as, for example, an antibody expressed by a bacteriophage or yeast expression system. The term should also be construed to mean an antibody which has been generated by the synthesis of a DNA molecule encoding the antibody and which DNA molecule expresses an antibody protein, or an amino acid sequence specifying the antibody, wherein the DNA or amino acid sequence has been obtained using recombinant DNA or amino acid sequence technology which is available and well known in the art.

[0093] The term “antigen” or “Ag” refers to a molecule that provokes an immune response. This immune response may involve either antibody production, or the activation of specific immunologically-competent cells, or both. The skilled artisan will understand that any macromolecule, including virtually all proteins or peptides, can serve as an antigen. Furthermore, antigens can be derived from recombinant or genomic DNA. A skilled artisan will understand that any DNA, which comprises a nucleotide sequences or a partial nucleotide sequence encoding a protein that elicits an immune response therefore encodes an “antigen” as that term is used herein. Furthermore, one skilled in the art will understand that an antigen need not be encoded solely by a full length nucleotide sequence of a gene. It is readily apparent that the present disclosure includes, but is not limited to, the use of partial nucleotide sequences of more than one gene and that these nucleotide sequences are arranged in various combinations to encode polypeptides that elicit the desired immune response. Moreover, a skilled artisan will understand that an antigen need not be encoded by a “gene” at all. It is readily apparent that an antigen can be generated or can be derived from a biological sample, or might be macromolecule besides a polypeptide. Such a biological sample can include, but is not limited to a tissue sample, a tumor sample, a cell or a fluid with other biological components.

[0094] The term “anti-tumor effect” or “anti-tumor activity” refers to a biological effect which can be manifested by various means, including but not limited to, e.g., a decrease in tumor volume, a decrease in the number of tumor cells, a decrease in the number of metastases, an increase in life expectancy, decrease in tumor cell proliferation, decrease in tumor cell survival, or amelioration of various physiological symptoms associated with the cancerous condition. An “anti-tumor effect” can also be manifested by the ability of the peptides, polynucleotides, cells and antibodies of the invention in prevention of the occurrence of tumor in the first place.

[0095] The term “autologous” refers to any material derived from the same individual to whom it is later to be re-introduced into the individual.

[0096] The term “allogeneic” refers to any material derived from a different animal of the same species as the individual to whom the material is introduced. Two or more individuals are said to be allogeneic to one another when the genes at one or more loci are not identical. In some aspects, allogeneic material from individuals of the same species may be sufficiently unlike genetically to interact antigenically

[0097] The term “xenogeneic” refers to a graft derived from an animal of a different species.

[0098] The term “apheresis” as used herein refers to an extracorporeal process by which the blood of a donor or patient is removed from the donor or patient and passed through an apparatus that separates out selected particular constituent(s) and returns the remainder to the circulation of the donor or patient, e.g., by retransfusion. Thus, in the context of “an apheresis sample” refers to a sample obtained using apheresis.

[0099] The term “cancer” refers to a disease characterized by the uncontrolled growth of aberrant cells. Cancer includes all types of cancerous growths or oncogenic processes, metastatic tissues or malignantly transformed cells, tissues or organs irrespective of the histopathologic type or stage of invasiveness. Cancer cells can spread locally or through the bloodstream and lymphatic system to other parts of the body. Examples of various cancers are described herein and include but are not limited to, breast cancer, prostate cancer, ovarian cancer, cervical cancer, skin cancer, pancreatic cancer, colorectal cancer, renal cancer, liver cancer, brain cancer, lymphoma, leukemia, lung cancer and the like.

[0100] “Derived from” as that term is used herein, indicates a relationship between a first and a second molecule. It generally refers to structural similarity between the first molecule and a second molecule and does not connotate or include a process or source limitation on a first molecule that is derived from a second molecule. For example, in the case of an intracellular signaling domain that is derived from a CD3zeta molecule, the intracellular signaling domain retains sufficient CD3zeta structure such that is has the required function, namely, the ability to generate a signal under the appropriate conditions. It does not connotate or include a limitation to a particular process of producing the intracellular signaling domain, e.g., it does not mean that, to provide the intracellular signaling domain, one must start with a CD3zeta sequence and delete unwanted sequence, or impose mutations, to arrive at the intracellular signaling domain.

[0101] The phrase “disease associated with expression of a tumor antigen” includes, but is not limited to, a disease associated with expression of a tumor antigen as described herein or condition associated with cells which express a tumor antigen as described herein including, e.g., proliferative diseases such as a cancer or malignancy or a precancerous condition such as a myelodysplasia, a myelodysplastic syndrome or a preleukemia; or a noncancer related indication associated with cells which express a tumor antigen as described herein. In one aspect, a cancer associated with expression of a tumor antigen as described herein is a hematological cancer. In one aspect, a cancer associated with expression of a tumor antigen as described herein is a solid cancer. Further diseases associated with expression of a tumor antigen described herein include, but not limited to, e.g., atypical and/or non-classical cancers, malignancies, precancerous conditions or proliferative diseases associated with expression of a tumor antigen as described herein. Non-cancer related indications associated with expression of a tumor antigen as described herein include, but are not limited to, e.g., autoimmune disease, (e.g., lupus), inflammatory disorders (allergy and asthma) and transplantation.

[0102] The term “conservative sequence modifications” refers to amino acid modifications that do not significantly affect or alter the binding characteristics of the antibody or antibody fragment containing the amino acid sequence. Such conservative modifications include amino acid substitutions, additions and deletions. Modifications can be introduced into an antibody or antibody fragment of the invention by standard techniques known in the art, such as site-directed mutagenesis and PCR-mediated mutagenesis. Conservative amino acid substitutions are ones in which the amino acid residue is replaced with an amino acid residue having a similar side chain. Families of amino acid residues having similar side chains have been defined in the art. These families include amino acids with basic side chains (e.g., lysine, arginine, histidine), acidic side chains (e.g., aspartic acid, glutamic acid), uncharged polar side chains (e.g., glycine, asparagine, glutamine, serine, threonine, tyrosine, cysteine, tryptophan), nonpolar side chains (e.g., alanine, valine, leucine, isoleucine, proline, phenylalanine, methionine), beta-branched side chains (e.g., threonine, valine, isoleucine) and aromatic side chains (e.g., tyrosine, phenylalanine, tryptophan, histidine). Thus, one or more amino acid residues within a CAR of the invention can be replaced with other amino acid residues from the same side chain family and the altered CAR can be tested using the functional assays described herein.

[0103] The term “stimulation,” refers to a primary response induced by binding of a stimulatory molecule (e.g., a TCR/CD3 complex or CAR) with its cognate ligand (or tumor antigen in the case of a CAR) thereby mediating a signal transduction event, such as, but not limited to, signal transduction via the TCR/CD3 complex or signal transduction via the appropriate NK receptor or signaling domains of the CAR. Stimulation can mediate altered expression of certain molecules, such as downregulation of TGF-β, and/or reorganization of cytoskeletal structures, and the like.

[0104] The term “stimulatory molecule,” refers to a molecule expressed by an immune effector cell (e.g., a T cell, NK cell, B cell) that provides the cytoplasmic signaling sequence(s) that regulate activation of the immune effector cell in a stimulatory way for at least some aspect of the immune effector cell signaling pathway, e.g., the T cell signaling pathway. In one aspect, the signal is a primary signal that is initiated by, for instance, binding of a TCR/CD3 complex with an MHC molecule loaded with peptide, and which leads to mediation of a T cell response, including, but not limited to, proliferation, activation, differentiation, and the like. A primary cytoplasmic signaling sequence (also referred to as a “primary signaling domain”) that acts in a stimulatory manner may contain a signaling motif which is known as immunoreceptor tyrosine-based activation motif or ITAM. Examples of an ITAM containing primary cytoplasmic signaling sequence that is of particular use in the invention includes, but is not limited to, those derived from CD3 zeta, common FcR gamma (FCER1G), Fc gamma RIIa, FcR beta (Fc epsilon Rib), CD3 gamma, CD3 delta, CD3 epsilon, CD5, CD22, CD79a, CD79b, CD278 (also known as “ICOS”), FcεRI, DAP10, DAP12, and CD66d. In a specific CAR of the invention, the intracellular signaling domain in any one or more CARs of the invention comprises an intracellular signaling sequence, e.g., a primary signaling sequence of CD3-zeta. In a specific CAR of the invention, the primary signaling sequence of CD3-zeta is the sequence provided as SEQ ID NO: 18, or the equivalent residues from a non-human species, e.g., mouse, rodent, monkey, ape and the like. In a specific CAR of the invention, the primary signaling sequence of CD3-zeta is the sequence as provided in SEQ ID NO:20, or the equivalent residues from a non-human species, e.g., mouse, rodent, monkey, ape and the like.

[0105] The term “antigen presenting cell” or “APC” refers to an immune system cell such as an accessory cell (e.g., a B-cell, a dendritic cell, and the like) that displays a foreign antigen complexed with major histocompatibility complexes (MHC's) on its surface. T-cells may recognize these complexes using their T-cell receptors (TCRs). APCs process antigens and present them to T-cells.

[0106] An “intracellular signaling domain,” as the term is used herein, refers to an intracellular portion of a molecule. The intracellular signaling domain generates a signal that promotes an immune effector function of the CAR-expressing cell, e.g., a CART cell or CAR-expressing NK cell. Examples of immune effector function, e.g., in a CART cell or CAR-expressing NK cell, include cytolytic activity and helper activity, including the secretion of cytokines. While the entire intracellular signaling domain can be employed, in many cases it is not necessary to use the entire chain. To the extent that a truncated portion of the intracellular signaling domain is used, such truncated portion may be used in place of the intact chain as long as it transduces the effector function signal. The term intracellular signaling domain is thus meant to include any truncated portion of the intracellular signaling domain sufficient to transduce the effector function signal.

[0107] In an embodiment, the intracellular signaling domain can comprise a primary intracellular signaling domain. Exemplary primary intracellular signaling domains include those derived from the molecules responsible for primary stimulation, or antigen dependent simulation. In an embodiment, the intracellular signaling domain can comprise a costimulatory intracellular domain. Exemplary costimulatory intracellular signaling domains include those derived from molecules responsible for costimulatory signals, or antigen independent stimulation. In an embodiment, the intracellular signaling domain is synthesized or engineered. For example, in the case of a CAR-expressing immune effector cell, e.g., CART cell or CAR-expressing NK cell, a primary intracellular signaling domain can comprise a cytoplasmic sequence of a T cell receptor, a primary intracellular signaling domain can comprise a cytoplasmic sequence of a T cell receptor, and a costimulatory intracellular signaling domain can comprise cytoplasmic sequence from co-receptor or costimulatory molecule.

[0108] A primary intracellular signaling domain can comprise a signaling motif which is known as an immunoreceptor tyrosine-based activation motif or ITAM. Examples of ITAM containing primary cytoplasmic signaling sequences include, but are not limited to, those derived from CD3 zeta, common FcR gamma (FCER1G), Fc gamma RIIa, FcR beta, CD3 gamma, CD3 delta, CD3 epsilon, CD5, CD22, CD79a, CD79b, CD278 (“ICOS”), FcεRI CD66d, DAP10 and DAP12.

[0109] The term “zeta” or alternatively “zeta chain”, “CD3-zeta” or “TCR-zeta” is defined as the protein provided as GenBan Ace. No. BAG36664.1, or the equivalent residues from a non-human species, e.g., mouse, rodent, monkey, ape and the like, and a “zeta stimulatory domain” or alternatively a “CD3-zeta stimulatory domain” or a “TCR-zeta stimulatory domain” is defined as the amino acid residues from the cytoplasmic domain of the zeta chain that are sufficient to functionally transmit an initial signal necessary for T cell activation. In one aspect the cytoplasmic domain of zeta comprises residues 52 through 164 of GenBank Acc. No. BAG36664.1 or the equivalent residues from a non-human species, e.g., mouse, rodent, monkey, ape and the like, that are functional orthologs thereof. In one aspect, the “zeta stimulatory domain” or a “CD3-zeta stimulatory domain” is the sequence provided as SEQ ID NO: 18. In one aspect, the “zeta stimulatory domain” or a “CD3-zeta stimulatory domain” is the sequence provided as SEQ ID NO:20. Also encompassed herein are CD3 zeta domains comprising one or more mutations to the amino acid sequences described herein, e.g., SEQ ID NO: 20.

[0110] The term “costimulatory molecule” refers to the cognate binding partner on a T cell that specifically binds with a costimulatory ligand, thereby mediating a costimulatory response by the T cell, such as, but not limited to, proliferation. Costimulatory molecules are cell surface molecules other than antigen receptors or their ligands that are required for an efficient immune response. Costimulatory molecules include, but are not limited to an MHC class I molecule, a TNF receptor protein, an Immunoglobulin-like protein, a cytokine receptor, an integrin, a signaling lymphocytic activation molecule (SLAM protein), an activating NK cell receptor, BTLA, a Toll ligand receptor, OX40, CD2, CD7, CD27, CD28, CD30, CD40, CDS, ICAM-1, LFA-1 (CD11a/CD18), 4-1BB (CD137), B7-H3, CDS, ICAM-1, ICOS (CD278), GITR, BAFFR, LIGHT, HVEM (LIGHTR), KIRDS2, SLAMF7, NKp80 (KLRF1), NKp44, NKp30, NKp46, CD19, CD4, CD8alpha, CD8beta, IL2R beta, IL2R gamma, IL7R alpha, ITGA4, VLA1, CD49a, ITGA4, IA4, CD49D, ITGA6, VLA-6, CD49f, ITGAD, CD11d, ITGAE, CD103, ITGAL, CD11a, LFA-1, ITGAM, CD11b, ITGAX, CD11c, ITGB1, CD29, ITGB2, CD18, LFA-1, ITGB7, NKG2D, NKG2C, TNFR2, TRANCE/RANKL, DNAM1 (CD226), SLAMF4 (CD244, 2B4), CD84, CD96 (Tactile), CEACAM1, CRTAM, Ly9 (CD229), CD160 (BY55), PSGL1, CD100 (SEMA4D), CD69, SLAMF6 (NTB-A, Ly108), SLAM (SLAMF1, CD150, IPO-3), BLAME (SLAMF8), SELPLG (CD162), LTBR, LAT, GADS, SLP-76, PAG/Cbp, CD19a, and a ligand that specifically binds with CD83.

[0111] A costimulatory intracellular signaling domain or costimulatory signaling domain can be the intracellular portion of a costimulatory molecule. The intracellular signaling domain can comprise the entire intracellular portion, or the entire native intracellular signaling domain, of the molecule from which it is derived, or a functional fragment thereof.

[0112] The term “4-1BB” refers to a member of the TNFR superfamily with an amino acid sequence provided as GenBank Acc. No. AAA62478.2, or the equivalent residues from a non-human species, e.g., mouse, rodent, monkey, ape and the like; and a “4-1BB costimulatory domain” is defined as amino acid residues 214-255 of GenBank Acc. No. AAA62478.2, or the equivalent residues from a non-human species, e.g., mouse, rodent, monkey, ape and the like. In one aspect, the “4-1BB costimulatory domain” is the sequence provided as SEQ ID NO: 14 or the equivalent residues from a non-human species, e.g., mouse, rodent, monkey, ape and the like.

[0113] “Immune effector cell,” as that term is used herein, refers to a cell that is involved in an immune response, e.g., in the promotion of an immune effector response. Examples of immune effector cells include T cells, e.g., alpha/beta T cells and gamma/delta T cells, B cells, natural killer (NK) cells, natural killer T (NKT) cells, mast cells, and myeloid-derived phagocytes.

[0114] “Immune effector function or immune effector response,” as that term is used herein, refers to function or response, e.g., of an immune effector cell, that enhances or promotes an immune attack of a target cell. E.g., an immune effector function or response refers a property of a T or NK cell that promotes killing or the inhibition of growth or proliferation, of a target cell. In the case of a T cell, primary stimulation and co-stimulation are examples of immune effector function or response.

[0115] The term “effector function” refers to a specialized function of a cell. Effector function of a T cell, for example, may be cytolytic activity or helper activity including the secretion of cytokines.

[0116] The term “encoding” refers to the inherent property of specific sequences of nucleotides in a polynucleotide, such as a gene, a cDNA, or an mRNA, to serve as templates for synthesis of other polymers and macromolecules in biological processes having either a defined sequence of nucleotides (e.g., rRNA, tRNA and mRNA) or a defined sequence of amino acids and the biological properties resulting therefrom. Thus, a gene, cDNA, or RNA, encodes a protein if transcription and translation of mRNA corresponding to that gene produces the protein in a cell or other biological system. Both the coding strand, the nucleotide sequence of which is identical to the mRNA sequence and is usually provided in sequence listings, and the non-coding strand, used as the template for transcription of a gene or cDNA, can be referred to as encoding the protein or other product of that gene or cDNA.

[0117] Unless otherwise specified, a “nucleotide sequence encoding an amino acid sequence” includes all nucleotide sequences that are degenerate versions of each other and that encode the same amino acid sequence. The phrase nucleotide sequence that encodes a protein or a RNA may also include introns to the extent that the nucleotide sequence encoding the protein may in some version contain an intron(s).

[0118] The term “effective amount” or “therapeutically effective amount” are used interchangeably herein, and refer to an amount of a compound, formulation, material, or composition, as described herein effective to achieve a particular biological result.

[0119] The term “endogenous” refers to any material from or produced inside an organism, cell, tissue or system.

[0120] The term “exogenous” refers to any material introduced from or produced outside an organism, cell, tissue or system.

[0121] The term “expression” refers to the transcription and/or translation of a particular nucleotide sequence driven by a promoter.

[0122] The term “transfer vector” refers to a composition of matter which comprises an isolated nucleic acid and which can be used to deliver the isolated nucleic acid to the interior of a cell. Numerous vectors are known in the art including, but not limited to, linear polynucleotides, polynucleotides associated with ionic or amphiphilic compounds, plasmids, and viruses. Thus, the term “transfer vector” includes an autonomously replicating plasmid or a virus. The term should also be construed to further include non-plasmid and non-viral compounds which facilitate transfer of nucleic acid into cells, such as, for example, a polylysine compound, liposome, and the like. Examples of viral transfer vectors include, but are not limited to, adenoviral vectors, adeno-associated virus vectors, retroviral vectors, lentiviral vectors, and the like.

[0123] The term “expression vector” refers to a vector comprising a recombinant polynucleotide comprising expression control sequences operatively linked to a nucleotide sequence to be expressed. An expression vector comprises sufficient cis-acting elements for expression; other elements for expression can be supplied by the host cell or in an in vitro expression system. Expression vectors include all those known in the art, including cosmids, plasmids (e.g., naked or contained in liposomes) and viruses (e.g., lentiviruses, retroviruses, adenoviruses, and adeno-associated viruses) that incorporate the recombinant polynucleotide.

[0124] The term “lentivirus” refers to a genus of the Retroviridae family. Lentiviruses are unique among the retroviruses in being able to infect non-dividing cells; they can deliver a significant amount of genetic information into the DNA of the host cell, so they are one of the most efficient methods of a gene delivery vector. HIV, SIV, and FIV are all examples of lentiviruses.

[0125] The term “lentiviral vector” refers to a vector derived from at least a portion of a lentivirus genome, including especially a self-inactivating lentiviral vector as provided in Milone et al., Mol. Ther. 17(8): 1453-1464 (2009). Other examples of lentivirus vectors that may be used in the clinic, include but are not limited to, e.g., the LENTIVECTOR® gene delivery technology from Oxford BioMedica, the LENTIMAX™ vector system from Lentigen and the like. Nonclinical types of lentiviral vectors are also available and would be known to one skilled in the art.

[0126] The term “homologous” or “identity” refers to the subunit sequence identity between two polymeric molecules, e.g., between two nucleic acid molecules, such as, two DNA molecules or two RNA molecules, or between two polypeptide molecules. When a subunit position in both of the two molecules is occupied by the same monomeric subunit; e.g., if a position in each of two DNA molecules is occupied by adenine, then they are homologous or identical at that position. The homology between two sequences is a direct function of the number of matching or homologous positions; e.g., if half (e.g., five positions in a polymer ten subunits in length) of the positions in two sequences are homologous, the two sequences are 50% homologous; if 90% of the positions (e.g., 9 of 10), are matched or homologous, the two sequences are 90% homologous.

[0127] “Humanized” forms of non-human (e.g., murine) antibodies are chimeric immunoglobulins, immunoglobulin chains or antibody fragments thereof (such as Fv, Fab, Fab′, F(ab′)2 or other antigen-binding subsequences of antibodies) which contain minimal sequence derived from non-human immunoglobulin. For the most part, humanized antibodies and antibody fragments thereof are human immunoglobulins (recipient antibody or antibody fragment) in which residues from a complementary-determining region (CDR) of the recipient are replaced by residues from a CDR of a non-human species (donor antibody) such as mouse, rat or rabbit having the desired specificity, affinity, and capacity. In some instances, Fv framework region (FR) residues of the human immunoglobulin are replaced by corresponding non-human residues. Furthermore, a humanized antibody/antibody fragment can comprise residues which are found neither in the recipient antibody nor in the imported CDR or framework sequences. These modifications can further refine and optimize antibody or antibody fragment performance. In general, the humanized antibody or antibody fragment thereof will comprise substantially all of at least one, and typically two, variable domains, in which all or substantially all of the CDR regions correspond to those of a non-human immunoglobulin and all or a significant portion of the FR regions are those of a human immunoglobulin sequence. The humanized antibody or antibody fragment can also comprise at least a portion of an immunoglobulin constant region (Fc), typically that of a human immunoglobulin. For further details, see Jones et al., Nature, 321: 522-525, 1986; Reichmann et al., Nature, 332: 323-329, 1988; Presta, Curr. Op. Struct. Biol., 2: 593-596, 1992.

[0128] “Fully human” refers to an immunoglobulin, such as an antibody or antibody fragment, where the whole molecule is of human origin or consists of an amino acid sequence identical to a human form of the antibody or immunoglobulin.

[0129] The term “isolated” means altered or removed from the natural state. For example, a nucleic acid or a peptide naturally present in a living animal is not “isolated,” but the same nucleic acid or peptide partially or completely separated from the coexisting materials of its natural state is “isolated.” An isolated nucleic acid or protein can exist in substantially purified form, or can exist in a non-native environment such as, for example, a host cell.

[0130] In the context of the present disclosure, the following abbreviations for the commonly occurring nucleic acid bases are used. “A” refers to adenosine, “C” refers to cytosine, “G” refers to guanosine, “T” refers to thymidine, and “U” refers to uridine.

[0131] The term “operably linked” or “transcriptional control” refers to functional linkage between a regulatory sequence and a heterologous nucleic acid sequence resulting in expression of the latter. For example, a first nucleic acid sequence is operably linked with a second nucleic acid sequence when the first nucleic acid sequence is placed in a functional relationship with the second nucleic acid sequence. For instance, a promoter is operably linked to a coding sequence if the promoter affects the transcription or expression of the coding sequence. Operably linked DNA sequences can be contiguous with each other and, e.g., where necessary to join two protein coding regions, are in the same reading frame.

[0132] The term “parenteral” administration of an immunogenic composition includes, e.g., subcutaneous (s.c.), intravenous (i.v.), intramuscular (i.m.), or intrasternal injection, intratumoral, or infusion techniques.

[0133] The term “nucleic acid” or “polynucleotide” refers to deoxyribonucleic acids (DNA) or ribonucleic acids (RNA) and polymers thereof in either single- or double-stranded form. Unless specifically limited, the term encompasses nucleic acids containing known analogues of natural nucleotides that have similar binding properties as the reference nucleic acid and are metabolized in a manner similar to naturally occurring nucleotides. Unless otherwise indicated, a particular nucleic acid sequence also implicitly encompasses conservatively modified variants thereof (e.g., degenerate codon substitutions), alleles, orthologs, SNPs, and complementary sequences as well as the sequence explicitly indicated. Specifically, degenerate codon substitutions may be achieved by generating sequences in which the third position of one or more selected (or all) codons is substituted with mixed-base and/or deoxyinosine residues (Batzer et al., Nucleic Acid Res. 19:5081 (1991); Ohtsuka et al., J. Biol. Chem. 260:2605-2608 (1985); and Rossolini et al., Mol. Cell. Probes 8:91-98 (1994)).

[0134] The terms “peptide,” “polypeptide,” and “protein” are used interchangeably, and refer to a compound comprised of amino acid residues covalently linked by peptide bonds. A protein or peptide must contain at least two amino acids, and no limitation is placed on the maximum number of amino acids that can comprise a protein's or peptide's sequence. Polypeptides include any peptide or protein comprising two or more amino acids joined to each other by peptide bonds. As used herein, the term refers to both short chains, which also commonly are referred to in the art as peptides, oligopeptides and oligomers, for example, and to longer chains, which generally are referred to in the art as proteins, of which there are many types. “Polypeptides” include, for example, biologically active fragments, substantially homologous polypeptides, oligopeptides, homodimers, heterodimers, variants of polypeptides, modified polypeptides, derivatives, analogs, fusion proteins, among others. A polypeptide includes a natural peptide, a recombinant peptide, or a combination thereof.

[0135] The term “promoter” refers to a DNA sequence recognized by the synthetic machinery of the cell, or introduced synthetic machinery, required to initiate the specific transcription of a polynucleotide sequence.

[0136] The term “promoter/regulatory sequence” refers to a nucleic acid sequence which is required for expression of a gene product operably linked to the promoter/regulatory sequence. In some instances, this sequence may be the core promoter sequence and in other instances, this sequence may also include an enhancer sequence and other regulatory elements which are required for expression of the gene product. The promoter/regulatory sequence may, for example, be one which expresses the gene product in a tissue specific manner.

[0137] The term “constitutive” promoter refers to a nucleotide sequence which, when operably linked with a polynucleotide which encodes or specifies a gene product, causes the gene product to be produced in a cell under most or all physiological conditions of the cell.

[0138] The term “inducible” promoter refers to a nucleotide sequence which, when operably linked with a polynucleotide which encodes or specifies a gene product, causes the gene product to be produced in a cell substantially only when an inducer which corresponds to the promoter is present in the cell.

[0139] The term “tissue-specific” promoter refers to a nucleotide sequence which, when operably linked with a polynucleotide encodes or specified by a gene, causes the gene product to be produced in a cell substantially only if the cell is a cell of the tissue type corresponding to the promoter.

[0140] The terms “B cell antigen” or “B-Cell antigen” are used interchangeably, and refer to a molecule (typically a protein, carbohydrate or lipid) that is preferentially and specifically expressed on the surface of a B cell which can be targeted with an agent which binds thereto. The B cell antigen of particular interest is preferentially expressed on B cells compared to other non-B cell tissues of a mammal. The B cell antigen may be expressed on one particular B cell population, e.g., B cell precursors or mature B cells, or on more than one particular B cell population, e.g., both precursor B cells and mature B cells. Exemplary B cell surface markers include: CD5, CD10, CD19, CD20, CD21, CD22, CD23, CD24, CD25, CD27, CD30, CD34, CD37, CD38, CD40, CD53, CD69, CD72, CD73, CD74, CD75, CD77, CD79a, CD79b, CD80, CD81, CD82, CD83, CD84, CD85, CD86, CD123, CD135, CD138, CD179, CD269, Flt3, ROR1, BCMA, FcRn5, FcRn2, CS-1, CXCR4, 5, 7, IL-7/3R, IL7/4/3R, and IL4R Particularly preferred B-Cell antigens include: CD19, CD20, CD22, FcRn5, FcRn2, BCMA, CS-1 and CD138. In embodiments, the B-Cell antigen is CD19. In embodiments, the B-Cell antigen is CD20. In embodiments, the B-Cell antigen is CD22. In embodiments, the B-Cell antigen is BCMA. In embodiments, the B-Cell antigen is FcRn5. In embodiments, the B-Cell antigen is FcRn2. In embodiments, the B-Cell antigen is CS-1. In embodiments, the B-Cell antigen is CD138.

[0141] The terms “cancer associated antigen” or “tumor antigen” interchangeably refers to a molecule (typically a protein, carbohydrate or lipid) that is expressed on the surface of a cancer cell, either entirely or as a fragment (e.g., MHC/peptide), and which is useful for the preferential targeting of a pharmacological agent to the cancer cell. In some embodiments, a tumor antigen is a marker expressed by both normal cells and cancer cells, e.g., a lineage marker, e.g., CD19 on B cells. In some embodiments, a tumor antigen is a cell surface molecule that is overexpressed in a cancer cell in comparison to a normal cell, for instance, 1-fold over expression, 2-fold overexpression, 3-fold overexpression or more in comparison to a normal cell. In some embodiments, a tumor antigen is a cell surface molecule that is inappropriately synthesized in the cancer cell, for instance, a molecule that contains deletions, additions or mutations in comparison to the molecule expressed on a normal cell. In some embodiments, a tumor antigen will be expressed exclusively on the cell surface of a cancer cell, entirely or as a fragment (e.g., MHC/peptide), and not synthesized or expressed on the surface of a normal cell. In some embodiments, the CARs of the present disclosure includes CARs comprising an antigen binding domain (e.g., antibody or antibody fragment) that binds to a MHC presented peptide. Normally, peptides derived from endogenous proteins fill the pockets of Major histocompatibility complex (MHC) class I molecules, and are recognized by T cell receptors (TCRs) on CD8+T lymphocytes. The MHC class I complexes are constitutively expressed by all nucleated cells. In cancer, virus-specific and/or tumor-specific peptide/MHC complexes represent a unique class of cell surface targets for immunotherapy. TCR-like antibodies targeting peptides derived from viral or tumor antigens in the context of human leukocyte antigen (HLA)-A1 or HLA-A2 have been described (see, e.g., Sastry et al., J Virol. 2011 85(5):1935-1942; Sergeeva et al., Blood, 2011 117(16):4262-4272; Verma et al., J Immunol 2010 184(4):2156-2165; Willemsen et al., Gene Ther 2001 8(21):1601-1608; Dao et al., Sci Transl Med 2013 5(176):176ra33; Tassev et al., Cancer Gene Ther 2012 19(2):84-100). For example, TCR-like antibody can be identified from screening a library, such as a human scFv phage displayed library. Accordingly, the present disclosure provides CARs that comprise an antigen binding domain that binds to a MHC presented peptide of a molecule selected from the group of WT1, NY-ESO-1, LAGE-1a, MAGE-A1 and RAGE-1.

[0142] The terms “solid tumor antigen” or “solid tumor cell antigen” refer to a molecule (typically a protein, carbohydrate or lipid) that is preferentially and specifically expressed on the surface of a solid tumor cell which can be targeted with an agent which binds thereto. The solid tumor antigen of particular interest is preferentially expressed on a solid tumor cell compared to other non-tumor tissues of a mammal. The solid tumor antigen may be expressed on one particular solid tumor cell population, e.g., on mesothelioma tumor cells, or on more than one particular solid tumor cell population, e.g., both mesothelioma tumor cells and ovarian cancer cells. Exemplary solid tumor antigens include: EGFRvIII, mesothelin, GD2, Tn Ag, PSMA, TAG72, CD44v6, CEA, EPCAM, KIT, IL-13Ra2, leguman, GD3, CD171, IL-11Ra, PSCA, MAD-CT-1, MAD-CT-2, VEGFR2, LewisY, CD24, PDGFR-beta, SSEA-4, folate receptor alpha, ERBBs (e.g., ERBB2), Her2/neu, MUC1, EGFR, NCAM, Ephrin B2, CAIX, LMP2, sLe, HMWMAA, o-acetyl-GD2, folate receptor beta, TEM1/CD248, TEM7R, FAP, Legumain, HPV E6 or E7, ML-IAP, CLDN6, TSHR, GPRC5D, ALK, Polysialic acid, Fos-related antigen, neutrophil elastase, TRP-2, CYP1B, sperm protein 17, beta human chorionic gonadotropin, AFP, thyroglobulin, PLAC1, globoH, RAGE1, MN-CA IX, human telomerase reverse transcriptase, intestinal carboxyl esterase, mut hsp 70-2, NA-17, NY-BR-1, UPK2, HAVCR1, ADRB3, PANX3, GPR20, Ly6k, OR51E2, TARP, GFRα4, and a peptide of any of these antigens presented on MHC. Particularly preferred solid tumor antigens include: CLDN6, mesothelin and EGFRvIII.

[0143] The terms “myeloid tumor antigen” or “myeloid tumor cell antigen” refer to a molecule (typically a protein, carbohydrate or lipid) that is preferentially and specifically expressed on the surface of a myeloid tumor cell which can be targeted with an agent which binds thereto. The myeloid tumor antigen of particular interest is preferentially expressed on a myeloid tumor cell compared to other non-tumor tissues of a mammal. The myeloid tumor antigen may be expressed on one particular myeloid tumor cell population, e.g., on acute myeloid leukemia (AML) tumor cells, or on more than one particular myeloid tumor cell population. Exemplary myeloid tumor antigens include: CD123, CD33 and CLL-1.

[0144] The term “antigen of a hematological tumor not of B-Cell lineage” refers to a molecule (typically a protein, carbohydrate or lipid) that is preferentially and specifically expressed on the surface of a tumor or cancer of hematopoietic or lymphoid tissue origin, other than of B-Cell origin. These include tumors of myeloid lineage origin, e.g., tumors derived from granulocyte, erythrocyte, thrombocyte, macrophage and/or mast cell origin, or any of their precursor cell populations, and tumors of lymphoid origin other than B-Cell origin, e.g., T cell, NK cell and/or plasma cell origin, or any of their precursor cell populations.

[0145] The term “flexible polypeptide linker” or “linker” as used in the context of a scFv refers to a peptide linker that consists of amino acids such as glycine and/or serine residues used alone or in combination, to link variable heavy and variable light chain regions together. In one embodiment, the flexible polypeptide linker is a Gly/Ser linker and comprises the amino acid sequence (Gly-Gly-Gly-Ser)ₙ, where n is a positive integer equal to or greater than 1. For example, n=1, n=2, n=3, n=4, n=5 and n=6, n=7, n=8, n=9 and n=10 (SEQ ID NO:28). In one embodiment, the flexible polypeptide linkers include, but are not limited to, (Gly4 Ser)₄ (SEQ ID NO:29) or (Gly4 Ser)₃ (SEQ ID NO:30). In another embodiment, the linkers include multiple repeats of (Gly2Ser), (GlySer) or (Gly3Ser) (SEQ ID NO:31). Also included within the scope of the invention are linkers described in WO2012/138475, incorporated herein by reference). As used herein, a 5′ cap (also termed an RNA cap, an RNA 7-methylguanosine cap or an RNA m⁷G cap) is a modified guanine nucleotide that has been added to the “front” or 5′ end of a eukaryotic messenger RNA shortly after the start of transcription. The 5′ cap consists of a terminal group which is linked to the first transcribed nucleotide. Its presence is critical for recognition by the ribosome and protection from RNases. Cap addition is coupled to transcription, and occurs co-transcriptionally, such that each influences the other. Shortly after the start of transcription, the 5′ end of the mRNA being synthesized is bound by a cap-synthesizing complex associated with RNA polymerase. This enzymatic complex catalyzes the chemical reactions that are required for mRNA capping. Synthesis proceeds as a multi-step biochemical reaction. The capping moiety can be modified to modulate functionality of mRNA such as its stability or efficiency of translation.

[0146] As used herein, “in vitro transcribed RNA” refers to RNA, preferably mRNA, that has been synthesized in vitro. Generally, the in vitro transcribed RNA is generated from an in vitro transcription vector. The in vitro transcription vector comprises a template that is used to generate the in vitro transcribed RNA.

[0147] As used herein, a “poly(A)” is a series of adenosines attached by polyadenylation to the mRNA. In the preferred embodiment of a construct for transient expression, the polyA is between 50 and 5000 (SEQ ID NO: 34), preferably greater than 64, more preferably greater than 100, most preferably greater than 300 or 400. Poly(A) sequences can be modified chemically or enzymatically to modulate mRNA functionality such as localization, stability or efficiency of translation.

[0148] As used herein, “polyadenylation” refers to the covalent linkage of a polyadenylyl moiety, or its modified variant, to a messenger RNA molecule. In eukaryotic organisms, most messenger RNA (mRNA) molecules are polyadenylated at the 3′ end. The 3′ poly(A) tail is a long sequence of adenine nucleotides (often several hundred) added to the pre-mRNA through the action of an enzyme, polyadenylate polymerase. In higher eukaryotes, the poly(A) tail is added onto transcripts that contain a specific sequence, the polyadenylation signal. The poly(A) tail and the protein bound to it aid in protecting mRNA from degradation by exonucleases. Polyadenylation is also important for transcription termination, export of the mRNA from the nucleus, and translation. Polyadenylation occurs in the nucleus immediately after transcription of DNA into RNA, but additionally can also occur later in the cytoplasm. After transcription has been terminated, the mRNA chain is cleaved through the action of an endonuclease complex associated with RNA polymerase. The cleavage site is usually characterized by the presence of the base sequence AAUAAA near the cleavage site. After the mRNA has been cleaved, adenosine residues are added to the free 3′ end at the cleavage site.

[0149] As used herein, “transient” refers to expression of a non-integrated transgene for a period of hours, days or weeks, wherein the period of time of expression is less than the period of time for expression of the gene if integrated into the genome or contained within a stable plasmid replicon in the host cell.

[0150] As used herein, the terms “treat”, “treatment” and “treating” refer to the reduction or amelioration of the progression, severity and/or duration of a proliferative disorder, or the amelioration of one or more symptoms (preferably, one or more discernible symptoms) of a proliferative disorder resulting from the administration of one or more therapies (e.g., one or more therapeutic agents such as a CAR of the invention). In specific embodiments, the terms “treat,” “treatment” and “treating” refer to the amelioration of at least one measurable physical parameter of a proliferative disorder, such as growth of a tumor, not necessarily discernible by the patient. In other embodiments the terms “treat”, “treatment” and “treating”-refer to the inhibition of the progression of a proliferative disorder, either physically by, e.g., stabilization of a discernible symptom, physiologically by, e.g., stabilization of a physical parameter, or both. In other embodiments the terms “treat”, “treatment” and “treating” refer to the reduction or stabilization of tumor size or cancerous cell count.

[0151] The term “signal transduction pathway” refers to the biochemical relationship between a variety of signal transduction molecules that play a role in the transmission of a signal from one portion of a cell to another portion of a cell. The phrase “cell surface receptor” includes molecules and complexes of molecules capable of receiving a signal and transmitting signal across the membrane of a cell.

[0152] The term “subject” is intended to include living organisms in which an immune response can be elicited (e.g., mammals, human).

[0153] The term, a “substantially purified” cell refers to a cell that is essentially free of other cell types. A substantially purified cell also refers to a cell which has been separated from other cell types with which it is normally associated in its naturally occurring state. In some instances, a population of substantially purified cells refers to a homogenous population of cells. In other instances, this term refers simply to cell that have been separated from the cells with which they are naturally associated in their natural state. In some aspects, the cells are cultured in vitro. In other aspects, the cells are not cultured in vitro.

[0154] The term “therapeutic” as used herein means a treatment. A therapeutic effect is obtained by reduction, suppression, remission, or eradication of a disease state.

[0155] The term “tolerance” or “immune tolerance” as used herein refers to a state in which a subject has a reduced or absent immune response to a specific antigen or group of antigens to which the subject is normally responsive to. Tolerance is achieved under conditions that suppress the immune reaction and is not just the absence of an immune response. In an embodiment, tolerance in a subject can be characterized by one or more of the following: a decreased level of a specific immunological response (e.g., mediated by antigen-specific effector T lymphocytes, B lymphocytes, or antibody); a delay in the onset or progression of a specific immunological response; or a reduced risk of the onset or progression of a specific immunological response, as compared to untreated subjects.

[0156] The term “prophylaxis” as used herein means the prevention of or protective treatment for a disease or disease state.

[0157] The term “transfected” or “transformed” or “transduced” refers to a process by which exogenous nucleic acid is transferred or introduced into the host cell. A “transfected” or “transformed” or “transduced” cell is one which has been transfected, transformed or transduced with exogenous nucleic acid. The cell includes the primary subject cell and its progeny.

[0158] The term “specifically binds,” refers to an antibody, or a ligand, which recognizes and binds with a cognate binding partner (e.g., a stimulatory and/or costimulatory molecule present on a T cell) protein present in a sample, but which antibody or ligand, does not substantially recognize or bind other molecules in the sample.

[0159] “Regulatable chimeric antigen receptor (RCAR),” as used herein, refers to a set of polypeptides, typically two in the simplest embodiments, which when in an immune effector cell, provides the cell with specificity for a target cell, typically a cancer cell, and with regulatable intracellular signal generation. In some embodiments, an RCAR comprises at least an extracellular antigen binding domain, a transmembrane and a cytoplasmic signaling domain (also referred to herein as “an intracellular signaling domain”) comprising a functional signaling domain derived from a stimulatory molecule and/or costimulatory molecule as defined herein in the context of a CAR molecule. In some embodiments, the set of polypeptides in the RCAR are not contiguous with each other, e.g., are in different polypeptide chains. In some embodiments, the RCAR includes a dimerization switch that, upon the presence of a dimerization molecule, can couple the polypeptides to one another, e.g., can couple an antigen binding domain to an intracellular signaling domain. In some embodiments, the RCAR is expressed in a cell (e.g., an immune effector cell) as described herein, e.g., an RCAR-expressing cell (also referred to herein as “RCARX cell”). In an embodiment the RCARX cell is a T cell, and is referred to as a RCART cell. In an embodiment the RCARX cell is an NK cell, and is referred to as a RCARN cell. The RCAR can provide the RCAR-expressing cell with specificity for a target cell, typically a cancer cell, and with regulatable intracellular signal generation or proliferation, which can optimize an immune effector property of the RCAR-expressing cell. In embodiments, an RCAR cell relies at least in part, on an antigen binding domain to provide specificity to a target cell that comprises the antigen bound by the antigen binding domain.

[0160] “Membrane anchor” or “membrane tethering domain”, as that term is used herein, refers to a polypeptide or moiety, e.g., a myristoyl group, sufficient to anchor an extracellular or intracellular domain to the plasma membrane.

[0161] “Switch domain,” as that term is used herein, e.g., when referring to an RCAR, refers to an entity, typically a polypeptide-based entity, that, in the presence of a dimerization molecule, associates with another switch domain. The association results in a functional coupling of a first entity linked to, e.g., fused to, a first switch domain, and a second entity linked to, e.g., fused to, a second switch domain. A first and second switch domain are collectively referred to as a dimerization switch. In embodiments, the first and second switch domains are the same as one another, e.g., they are polypeptides having the same primary amino acid sequence, and are referred to collectively as a homodimerization switch. In embodiments, the first and second switch domains are different from one another, e.g., they are polypeptides having different primary amino acid sequences, and are referred to collectively as a heterodimerization switch. In embodiments, the switch is intracellular. In embodiments, the switch is extracellular. In embodiments, the switch domain is a polypeptide-based entity, e.g., FKBP or FRB-based, and the dimerization molecule is small molecule, e.g., a rapalogue. In embodiments, the switch domain is a polypeptide-based entity, e.g., an scFv that binds a myc peptide, and the dimerization molecule is a polypeptide, a fragment thereof, or a multimer of a polypeptide, e.g., a myc ligand or multimers of a myc ligand that bind to one or more myc scFvs. In embodiments, the switch domain is a polypeptide-based entity, e.g., myc receptor, and the dimerization molecule is an antibody or fragments thereof, e.g., myc antibody.

[0162] “Dimerization molecule,” as that term is used herein, e.g., when referring to an RCAR, refers to a molecule that promotes the association of a first switch domain with a second switch domain. In embodiments, the dimerization molecule does not naturally occur in the subject, or does not occur in concentrations that would result in significant dimerization. In embodiments, the dimerization molecule is a small molecule, e.g., rapamycin or a rapalogue, e.g, RAD001.

[0163] The term “bioequivalent” refers to an amount of an agent other than the reference compound (e.g., RAD001), required to produce an effect equivalent to the effect produced by the reference dose or reference amount of the reference compound (e.g., RAD001). In an embodiment the effect is the level of mTOR inhibition, e.g., as measured by P70 S6 kinase inhibition, e.g., as evaluated in an in vivo or in vitro assay, e.g., as measured by an assay described herein, e.g., the Boulay assay, or measurement of phosphorylated S6 levels by western blot. In an embodiment, the effect is alteration of the ratio of PD-1 positive/PD-1 negative T cells, as measured by cell sorting. In an embodiment a bioequivalent amount or dose of an mTOR inhibitor is the amount or dose that achieves the same level of P70 S6 kinase inhibition as does the reference dose or reference amount of a reference compound. In an embodiment, a bioequivalent amount or dose of an mTOR inhibitor is the amount or dose that achieves the same level of alteration in the ratio of PD-1 positive/PD-1 negative T cells as does the reference dose or reference amount of a reference compound.

[0164] The term “low, immune enhancing, dose” when used in conjunction with an mTOR inhibitor, e.g., an allosteric mTOR inhibitor, e.g., RAD001 or rapamycin, or a catalytic mTOR inhibitor, refers to a dose of mTOR inhibitor that partially, but not fully, inhibits mTOR activity, e.g., as measured by the inhibition of P70 S6 kinase activity. Methods for evaluating mTOR activity, e.g., by inhibition of P70 S6 kinase, are discussed herein. The dose is insufficient to result in complete immune suppression but is sufficient to enhance the immune response. In an embodiment, the low, immune enhancing, dose of mTOR inhibitor results in a decrease in the number of PD-1 positive T cells and/or an increase in the number of PD-1 negative T cells, or an increase in the ratio of PD-1 negative T cells/PD-1 positive T cells. In an embodiment, the low, immune enhancing, dose of mTOR inhibitor results in an increase in the number of naive T cells. In an embodiment, the low, immune enhancing, dose of mTOR inhibitor results in one or more of the following:

[0165] an increase in the expression of one or more of the following markers: CD62L^{high}, CD127^{high}, CD27⁺, and BCL2, e.g., on memory T cells, e.g., memory T cell precursors;

[0166] a decrease in the expression of KLRG1, e.g., on memory T cells, e.g., memory T cell precursors; and

[0167] an increase in the number of memory T cell precursors, e.g., cells with any one or combination of the following characteristics: increased CD62L^{high}, increased CD127^{high}, increased CD27′, decreased KLRG1, and increased BCL2;

[0168] wherein any of the changes described above occurs, e.g., at least transiently, e.g., as compared to a non-treated subject.

[0169] “Refractory” as used herein refers to a disease, e.g., cancer, that does not respond to a treatment. In embodiments, a refractory cancer can be resistant to a treatment before or at the beginning of the treatment. In other embodiments, the refractory cancer can become resistant during a treatment. A refractory cancer is also called a resistant cancer.

[0170] “Relapsed” or “relapse” as used herein refers to the return or reappearance of a disease (e.g., cancer) or the signs and symptoms of a disease such as cancer after a period of improvement or responsiveness, e.g., after prior treatment of a therapy, e.g., cancer therapy. The initial period of responsiveness may involve the level of cancer cells falling below a certain threshold, e.g., below 200, 1%, 10%, 5%, 4%, 3%, 2%, or 1%. The reappearance may involve the level of cancer cells rising above a certain threshold, e.g., above 20%, 1%, 10%, 5%, 4%, 3%, 2%, or 1%. For example, e.g., in the context of B-ALL, the reappearance may involve, e.g., a reappearance of blasts in the blood, bone marrow (>5%), or any extramedullary site, after a complete response. A complete response, in this context, may involve <5% BM blast. More generally, in an embodiment, a response (e.g., complete response or partial response) can involve the absence of detectable MRD (minimal residual disease). In an embodiment, the initial period of responsiveness lasts at least 1, 2, 3, 4, 5, or 6 days, at least 1, 2, 3, or 4 weeks; at least 1, 2, 3, 4, 6, 8, 10, or 12 months; or at least 1, 2, 3, 4, or 5 years.

[0171] Ranges: throughout this disclosure, various aspects of the invention can be presented in a range format. It should be understood that the description in range format is merely for convenience and brevity and should not be construed as an inflexible limitation on the scope of the invention. Accordingly, the description of a range should be considered to have specifically disclosed all the possible subranges as well as individual numerical values within that range. For example, description of a range such as from 1 to 6 should be considered to have specifically disclosed subranges such as from 1 to 3, from 1 to 4, from 1 to 5, from 2 to 4, from 2 to 6, from 3 to 6 etc., as well as individual numbers within that range, for example, 1, 2, 2.7, 3, 4, 5, 5.3, and 6. As another example, a range such as 95-99% identity, includes something with 95%, 96%, 97%, 98% or 99% identity, and includes subranges such as 96-99%, 96-98%, 96-97%, 97-99%, 97-98% and 98-99% identity. This applies regardless of the breadth of the range.

### DESCRIPTION

[0172] Provided herein are compositions and methods of use for the treatment of a disease, such as cancer, comprising the use of a cell, e.g., an immune effector cell (e.g., an NK cell or T cell) engineered to express a first CAR molecule that targets a B-Cell antigen (e.g., a BCA CAR) and a second CAR molecule that targets a tumor antigen (e.g., a TA CAR). In an embodiment, the disease is a cancer, such as a solid tumor, myeloid tumor or hematological tumor not of B-Cell lineage. In an embodiment, the tumor is a solid tumor. In an embodiment, the tumor is a myeloid tumor. In an embodiment, the tumor is a hematological tumor not of B-Cell lineage.

[0173] In embodiments, the compositions and methods described herein result in a tumor-targeting CAR-expressing immune effector cell with enchanted proliferation and/or with increased or prolonged in vivo persistence, relative to the same cell which does not express the BCA CAR.

[0174] Without wishing to be bound by theory, treatment with a cell, e.g., an immune effector cell expressing a CAR targeting a B-Cell antigen (BCA CAR) on an immune effector cell expressing a CAR targeting a tumor antigen (TA CAR) enhances the anti tumor efficacy of the TA CAR-expressing immune effector cell in a subject, e.g., by one or more of: increasing the proliferation of said CAR-expressing immune effector cells and/or increasing the in vivo persistence of said CAR expressing immune effector cells, e.g., as compared to administering an immune effector cell expressing only the TA CAR (e.g., not expressing the BCA CAR). Without being bound by theory, CAR cell therapies targeting, e.g., solid tumors, may suffer from lack of persistence in vivo as cells expressing the tumor antigen targeted by the CAR become inaccessible, or drop in number due to the effect of the CAR expressing cell. In contrast, CAR-T cell therapy targeting B-Cell antigens such as, for example, CD19, exhibit rapid and significant expansion in vivo, followed by long-term persistence. Without being bound by theory, these beneficial effects observed for CAR-T cell therapy targeting B-Cell antigens may be mediated by the widespread (i.e., circulating) availability of B-Cells which allows cells expressing a B-Cell antigen-targeting CAR to be exposed to, and be stimulated by, this readily available cell population and may further be enhanced by the natural immune-stimulatory effects of B-cell/T-cell interaction. Thus, without being bound by theory, inclusion of a CAR targeting a B-cell antigen is beneficial in that it mediates rapid expansion and persistence of the CART cell expressing said CAR, and that when the CAR cell further expresses a tumor antigen, such cell benefits from those effects relative to a CAR T cell which only expresses the tumor antigen-targeting CAReven when populations of cells expressing the tumor antigen are low, inaccessible or non-existent, thereby allowing the CART cells be primed for mediating improved cytotoxicity against the tumor antigen-expressing cell, e.g., cancer, and to persist through periods of remission and can then become effective in periods of relapse, without having to readminister cells. Thus, administering cells, e.g., immune effector cells, expressing both a BCA CAR and a TA CAR can enhance the efficacy of a TA CAR-expressing cell for treating a disease, e.g., cancer.

[0175] The cells of the present disclosure are genetically engineered to express a first CAR molecule, wherein the first CAR molecule comprises an antigen binding domain specific for a B-Cell antigen, and genetically engineered to express a second CAR molecule, wherein the second CAR molecule comprises an antigen binding domain specific for a tumor antigen. In embodiments, the B-cell antigen is not expressed on the cell which expresses the tumor antigen. The antigen binding domain binds to a B cell antigen described herein or a tumor antigen described herein. A CAR molecule that binds to a B cell antigen is also referred to herein as “BCA CAR”. A CAR molecule that binds to a tumor antigen other than a B-Cell antigen, e.g., a solid tumor antigen, a myeloid tumor antigen, or an antigen of a hematological tumor not of B-Cell origin, is also referred to herein as “TA CAR”. The CAR may further comprise a transmembrane domain and an intracellular signaling domain comprising a costimulatory domain and/or a primary signaling domain, e.g., as described herein. In an embodiment, the intracellular signaling domain of the BCA CAR and/or TA CAR includes, but is not limited to, one or more of a CD3-zeta chain, 4-1BB, CD27, ICOS, and CD28 signaling modules and combinations thereof.

[0176] In one aspect, the invention provides an immune effector cell (e.g., T cell, NK cell) engineered to express a TA CAR and engineered to express a BCA CAR, wherein the engineered immune effector cell exhibits an antitumor property, e.g., reduces tumor volume, stimulates tumor regression, decreases tumor burden, or increases overall survival; while at the same time having increased persistence in vivo, or increased proliferation, relative to the same cell which does not express the BCA CAR.

[0177] Also described herein are methods of using said cells engineered to express a BCA CAR and a TA CAR.

[0178] Also described herein are methods of making or selecting a cell engineered to express a BCA CAR and a TA CAR, methods for administering the cells for treating a disease associated with a tumor antigen, and additional combination therapies for use with the cells of the invention.

### Chimeric Antigen Receptor (CAR)

[0179] The present disclosure encompasses immune effector cells (e.g., T cells or NK cells) comprising one or more recombinant nucleic acid constructs comprising sequences encoding a CAR molecule that binds to a tumor antigen (e.g., a TA CAR) and a CAR molecule that binds to a B cell antigen (e.g., a BCA CAR), wherein the TA CAR comprises an antigen binding domain (e.g., antibody or antibody fragment, TCR or TCR fragment) that binds specifically to a tumor antigen described herein and the BCA CAR comprises an antigen binding domain (e.g., antibody or antibody fragment, TCR or TCR fragment) that binds specifically to a B cell antigen described herein, e.g., wherein the sequence of the antigen binding domain is contiguous with and in the same reading frame as a nucleic acid sequence encoding an intracellular signaling domain. The intracellular signaling domain can comprise a costimulatory signaling domain and/or a primary signaling domain, e.g., a zeta chain. The costimulatory signaling domain refers to a portion of the CAR comprising at least a portion of the intracellular domain of a costimulatory molecule.

[0180] In one aspect, the CARs of the invention comprise at least one intracellular signaling domain selected from the group of a CD137 (4-1BB) signaling domain, a CD28 signaling domain, a CD27 signaling domain, an ICOS signaling domain, a CD3zeta signal domain, and any combination thereof. In one aspect, the CARs of the invention comprise at least one intracellular signaling domain is from one or more costimulatory molecule(s) selected from CD137 (4-1BB), CD28, CD27, or ICOS.

[0181] Sequences of non-limiting examples of various components that can be part of a CAR molecule, e.g., a TA CAR or a BCA CAR described herein, are listed in Table 1, where “aa” stands for amino acids, and “na” stands for nucleic acids that encode the corresponding peptide.

TABLE 1
Sequences of various components of CAR (aa-amino acids;
na-nucleic acids that encodes the corresponding protein

| SEQ | | |
|---|---|---|
| ID NO | Description | Sequence |
| 1 | EF-1 | CGTGAGGCTCCGGTGCCCGTCAGTGGGCAGAGCGCACATCGCCCACAGTCCCCGAGAAG |
| | promoter (na) | TTGGGGGGAGGGGTCGGCAATTGAACCGGTGCCTAGAGAAGGTGGCGCGGGGTAAACTG |
| | | GAAAGTGATGTCGTGTACTGGCTCCGCCTTTTTCCCGAGGGTGGGGGAGAACCGTATAT |
| | | AAGTGCAGTAGTCGCCGTGAACGTTCTTTTTCGCAACGGGTTTGCCGCCAGAACACAGG |
| | | TAAGTGCCGTGTGTGGTTCCCGCGGGCCTGGCCTCTTTACGGGTTATGGCCCTTGCGTG |
| | | CCTTGAATTACTTCCACCTGGCTGCAGTACGTGATTCTTGATCCCGAGCTTCGGGTTGG |
| | | AAGTGGGTGGGAGAGTTCGAGGCCTTGCGCTTAAGGAGCCCCTTCGCCTCGTGCTTGAG |
| | | TTGAGGCCTGGCCTGGGCGCTGGGGCCGCCGCGTGCGAATCTGGTGGCACCTTCGCGCC |
| | | TGTCTCGCTGCTTTCGATAAGTCTCTAGCCATTTAAAATTTTTGATGACCTGCTGCGAC |
| | | GCTTTTTTTCTGGCAAGATAGTCTTGTAAATGCGGGCCAAGATCTGCACACTGGTATTT |
| | | CGGTTTTTGGGGCCGCGGGCGGCGACGGGGCCCGTGCGTCCCAGCGCACATGTTCGGCG |
| | | AGGCGGGGCCTGCGAGCGCGGCCACCGAGAATCGGACGGGGGTAGTCTCAAGCTGGCCG |
| | | GCCTGCTCTGGTGCCTGGCCTCGCGCCGCCGTGTATCGCCCCGCCCTGGGCGGCAAGGC |
| | | TGGCCCGGTCGGCACCAGTTGCGTGAGCGGAAAGATGGCCGCTTCCCGGCCCTGCTGCA |
| | | GGGAGCTCAAAATGGAGGACGCGGCGCTCGGGAGAGCGGGCGGGTGAGTCACCCACACA |
| | | AAGGAAAAGGGCCTTTCCGTCCTCAGCCGTCGCTTCATGTGACTCCACGGAGTACCGGG |
| | | CGCCGTCCAGGCACCTCGATTAGTTCTCGAGCTTTTGGAGTACGTCGTCTTTAGGTTGG |
| | | GGGGAGGGGTTTTATGCGATGGAGTTTCCCCACACTGAGTGGGTGGAGACTGAAGTTAG |
| | | GCCAGCTTGGCACTTGATGTAATTCTCCTTGGAATTTGCCCTTTTTGAGTTTGGATCTT |
| | | GGTTCATTCTCAAGCCTCAGACAGTGGTTCAAAGTTTTTTTCTTCCATTTCAGGTGTCG |
| | | TGA |
| 2 | Leader (aa) | MALPVTALLLPLALLLHAARP |
| 3 | Leader (na) | ATGGCCCTGCCTGTGACAGCCCTGCTGCTGCCTCTGGCTCTGCTGCTGCATGCCGCTAG |
| | | ACCC |
| 307 | Leader | ATGGCCCTCCCTGTCACCGCCCTGCTGCTTCCGCTGGCTCTTCTGCTCCACGCCGCTCG |
| | (na-v2) | GCCC |
| 4 | CD 8 hinge | TTTPAPRPPTPAPTIASQPLSLRPEQACRPAAGGAVHTRGLDFACD |
| | (aa) | |
| 5 | CD8 hinge | ACCACGACGCCAGCGCCGCGACCACCAACACCGGCGCCCACCATCGCGTCGCAGCCCCT |
| | (na) | GTCCCTGCGCCCAGAGGCGTGCCGGCCAGCGGCGGGGGGCGCAGTGCACACGAGGGGGC |
| | | TGGACTTCGCCTGTGAT |
| 6 | Ig4 hinge | ESKYGPPCPPAPAPEFLGGPSVFLFPPKPKDTLMISRTPEVTCVVVSVSQEDPEVQFNW |
| | (aa) | YVDGVEVHNAKTKPREEQFNSTYRVVSVLTVLHQDWLNGKEYKCKVSNKGLPSSIEKTI |
| | | SKAKGQPREPQVYTLPPSQEEMTKNQVSLTCLVKGFYPSDIAVEWESNGQPENNYKTTP |
| | | PVLDSDGSFFLYSRLTVDKSRWQEGNVFSCSVMHEALHNHYTQKSLSLSLGKM |
| 7 | Ig4 hinge | GAGAGCAAGTACGGCCCTCCCTGCCCCCCTTGCCCTGCCCCCGAGTTCCTGGGCGGACC |
| | (na) | CAGCGTGTTCCTGTTCCCCCCCAAGCCCAAGGACACCCTGATGATCAGCCGGACCCCCG |
| | | AGGTGACCTGTGTGGTGGTGGACGTGTCCCAGGAGGACCCCGAGGTCCAGTTCAACTGG |
| | | TACGTGGACGGCGTGGAGGTGCACAACGCCAAGACCAAGCCCCGGGAGGAGCAGTTCAA |
| | | TAGCACCTACCGGGTGGTGTCCGTGCTGACCGTGCTGCACCAGGACTGGCTGAACGGCA |
| | | AGGAATACAAGTGTAAGGTGTCCAACAAGGGCCTGCCCAGCAGCATCGAGAAAACCATC |
| | | AGCAAGGCCAAGGGCCAGCCTCGGGAGCCCCAGGTGTACACCCTGCCCCCTAGCCAAGA |
| | | GGAGATGACCAAGAACCAGGTGTCCCTGACCTGCCTGGTGAAGGGCTTCTACCCCAGCG |
| | | ACATCGCCGTGGAGTGGGAGAGCAACGGCCAGCCCGAGAACAACTACAAGACCACCCCC |
| | | CCTGTGCTGGACAGCGACGGCAGCTTCTTCCTGTACAGCCGGCTGACCGTGGACAAGAG |
| | | CCGGTGGCAGGAGGGCAACGTCTTTAGCTGCTCCGTGATGCACGAGGCCCTGCACAACC |
| | | ACTACACCCAGAAGAGCCTGAGCCTGTCCCTGGGCAAGATG |
| 8 | IgD hinge | RWPESPKAQASSVPTAQPQAEGSLAKATTAPATTRNTGRGGEEKKKEKEKEEQEERETK |
| | (aa) | TPECPSHTQPLGVYLLTPAVQDLWLRDKATFTCFVVGSDLKDAHLTWEVAGKVPTGGVE |
| | | EGLLERHSNGSQSQHSRLTLPRSLWNAGTSVTCTLNHPSLPPQRLMALREPAAQAPVKL |
| | | SLNLLASSDPPEAASWLLCEVSGFSPPNILLMWLEDQREVNTSGFAPARPPPQPGSTTF |
| | | WAWSVLRVPAPPSPQPATYTCVVSHEDSRTLLNASRSLEVSYVTDH |
| 9 | IgD hinge | AGGTGGCCCGAAAGTCCCAAGGCCCAGGCATCTAGTGTTCCTACTGCACAGCCCCAGGC |
| | (na) | AGAAGGCAGCCTAGCCAAAGCTACTACTGCACCTGCCACTACGCGCAATACTGGCCGTG |
| | | GCGGGGAGGAGAAGAAAAAGGAGAAAGAGAAAGAAGAACAGGAAGAGAGGGAGACCAAG |
| | | ACCCCTGAATGTCCATCCCATACCCAGCCGCTGGGCGTCTATCTCTTGACTCCCGCAGT |
| | | ACAGGACTTGTGGCTTAGAGATAAGGCCACCTTTACATGTTTCGTCGTGGGCTCTGACC |
| | | TGAAGGATGCCCATTTGACTTGGGAGGTTGCCGGAAAGGTACCCACAGGGGGGGTTGAG |
| | | GAAGGGTTGCTGGAGCGCCATTCCAATGGCTCTCAGAGCAGCACTCAAGACTCACCCTT |
| | | CCGAGATCCCTGTGGAACGCCGGGACCTCTGTCACATGTACTCTAAATCATCCTAGCCT |
| | | GCCCCCACAGCGTCTGATGGCCCTTAGAGAGCCAGCCGCCCAGGCACCAGTTAAGCTTA |
| | | GCCTGAATCTGCTCGCCAGTAGTGATCCCCCAGAGGCCGCCAGCTGGCTCTTATGCGAA |
| | | GTGTCCGGCTTTAGCCCGCCCAACATCTTGCTCATGTGGCTGGAGGACCAGCGAGAAGT |
| | | GAACACCAGCGGCTTCGCTCCAGCCCGGCCCCCACCCCAGCCGGGTTCTACCACATTCT |
| | | GGGCCTGGAGTGTCTTAAGGGTCCCAGCACCACCTAGCCCCCAGCCAGCCACATACACC |
| | | TGTGTTGTGTCCCATGAAGATAGCAGGACCCTGCTAAATGCTTCTAGGAGTCTGGAGGT |
| | | TTCCTACGTGACTGACCATT |
| 10 | GS | GGGGSGGGGS |
| | hinge/linker | |
| | (aa) | |
| 11 | GS | GGTGGCGGAGGTTCTGGAGGTGGAGGTTCC |
| | hinge/linker | |
| | (na) | |
| 12 | CD8TM | IYIQAPLAGTCGVLLLSLVITLYC |
| | (aa) | |
| 13 | CD8 TM | ATCTACATCTGGGCGCCCTTGGCCGGGACTTGTGGGGTCCTTCTCCTGTCACTGGTTAT |
| | (na) | CACCCTTTACTGC |
| 308 | CD8 TM | ATCTACATTTGGGCCCCTCTGGCTGGTACTTGCGGGGTCCTGCTGCTTTCACTCGTGAT |
| | (na-v2) | CACTCTTTACTGT |
| 14 | 4-1BB | KRGRKKLLYIFKQPFMRPVQTTQEEDGCSCRFPEEEEGGCEL |
| | intracellular | |
| | domain (aa) | |
| 15 | 4-1BB | AAACGGGGCAGAAAGAAACTCCTGTATATATTCAAACAACCATTTATGAGACCAGTACA |
| | intracellular | AACTACTCAAGAGGAAGATGGCTGTAGCTGCCGATTTCCAGAAGAAGAAGAAGGAGGAT |
| | domain (na) | GTGAACTG |
| 309 | 4-1BB | AAGCGCGGTCGGAAGAAGCTGCTGTACATCTTTAAGCAACC |
| | intracellular | |
| | domain | |
| | (na-v2) | |
| 16 | CD27 | QRRKYRSNKGESPVEPAEPCRYSCPREEEGSTIPIQEDYRKPEPACSP |
| | intracellular | |
| | domain (aa) | |
| 17 | CD27 | AGGAGTAAGAGGAGCAGGCTCCTGCACAGTGACTACATGAACATGACTCCCCGCCGCCC |
| | intracellular | CGGGCCCACCCGCAAGCATTACCAGCCCTATGCCCCACCACGCGACTTCGCAGCCTATC |
| | domain (na) | GCTCC |
| 18 | CD3-zeta | RVKFSRSADAPAYKQGQNQLYNELNLGRREEYDVLDKRRGRDPEMGGKPRRKNPQEGLY |
| | (aa) | NELQKDKMAEAYSEIGMKGERRRGKGHDGLYQGLSTATKDTYDALHMQALPPR |
| 19 | CD3-zeta | AGAGTGAAGTTCAGCAGGAGCGCAGACGCCCCCGCGTACAAGCAGGGCCAGAACCAGCT |
| | (na) | CTATAACGAGCTCAATCTAGGACGAAGAGAGGAGTACGATGTTTTGGACAAGAGACGTG |
| | | GCCGGGACCCTGAGATGGGGGGAAAGCCGAGAAGGAAGAACCCTCAGGAAGGCCTGTAC |
| | | AATGAACTGCAGAAAGATAAGATGGCGGAGGCCTACAGTGAGATTGGGATGAAAGGCGA |
| | | GCGCCGGAGGGGCAAGGGGCACGATGGCCTTTACCAGGGTCTCAGTACAGCCACCAAGG |
| | | ACACCTACGACGCCCTTCACATGCAGGCCCTGCCCCCTCGC |
| 310 | CD3-zeta | CGCGTGAAATTCAGCCGCAGCGCAGATGCTCCAGCCTACAAGCAGGGGCAGAACCAGCT |
| | (na-v2) | CTACAACGAACTCAATCTTGGTCGGAGAGAGGAGTACGACGTGCTGGACAAGCGGAGAG |
| | | GACGGGACCCAGAAATGGGCGGGAAGCCGCGCAGAAAGAATCCCCAAGAGGGCCTGTAC |
| | | AACGAGCTCCAAAAGGATAAGATGGCAGAAGCCTATAGCGAGATTGGTATGAAAGGGGA |
| | | ACGCAGAAGAGGCAAAGGCCACGACGGACTGTACCAGGGACTCAGCACCGCCACCAAGG |
| | | ACACCTATGACGCTCTTCACATGCAGGCCCTGCCGCCTCGG |
| 20 | CD3-zeta | RVKFSRSADAPAYQQGQNQLYNELNLGRREEYDVLDKRRGRDPEMGGKPRRKNPQEGLY |
| | (aa) | NELQKDKMAEAYSEIGMKGERRRGKGHDGLYQGLSTATKDTYDALHMQALPPR |
| 21 | CD3-zeta | AGAGTGAAGTTCAGCAGGAGCGCAGACGCCCCCGCGTACCAGCAGGGCCAGAACCAGCT |
| | (na) | CTATAACGAGCTCAATCTAGGACGAAGAGAGGAGTACGATGTTTTGGACAAGAGACGTG |
| | | GCCGGGACCCTGAGATGGGGGGAAAGCCGAGAAGGAAGAACCCTCAGGAAGGCCTGTAC |
| | | AATGAACTGCAGAAAGATAAGATGGCGGAGGCCTACAGTGAGATTGGGATGAAAGGCGA |
| | | GCGCCGGAGGGGCAAGGGGCACGATGGCCTTTACCAGGGTCTCAGTACAGCCACCAAGG |
| | | ACACCTACGACGCCCTTCACATGCAGGCCCTGCCCCCTCGC |
| 22 | linker | GGGGS |
| 23 | linker | GGTGGCGGAGGTTCTGGAGGTGGAGGTTCC |
| 24 | PD-1 | Pgwfldspdrpwnpptfspallvvtgegdnatftcsfsntsesfvlnwyrmspsnqtdk |
| | extracellular | laafpedrsqpgqdcrfrvtqlpngrdfhmsvvrarrndsgtylcgaislapkaqikes |
| | domain (aa) | lraelrvterraevptahpspsprpagqfqtlv |
| 25 | PD-1 | Cccggatggtttctggactctccggatcgcccgtggaatcccccaaccttctcaccggc |
| | extracellular | actcttggttgtgactgagggcgataatgcgaccttcacgtgctcgttctccaacacct |
| | domain (na) | ccgaatcattcgtgctgaactggtaccgcatgagcccgtcaaaccagaccgacaagctc |
| | | gccgcgtttccggaagatcggtcgcaaccgggacaggattgtcggttccgcgtgactca |
| | | actgccgaatggcagagacttccacatgagcgtggtccgcgctaggcgaaacgactccg |
| | | ggacctacctgtgcggagccatctcgctggcgcctaaggcccaaatcaaagagagcttg |
| | | agggccgaactgagagtgaccgagcgcagagctgaggtgccaactgcacatccatcccc |
| | | atcgcctcggcctgcggggcagtttcagaccctggtc |
| 26 | PD-1 CAR | Malppvtalllplalllhaarppgwfldspdrpwnpptfspallvvtgegdnatftcsf |
| | (aa) with | sntsesfvlnwyrmspsnqtdklaafpedrsqpgqdcrfrvtqlpngrdfhmsvvrarr |
| | signal | ndsgtylcgaislapkaqikeslraelrvterraevptahpspsprpagqfqtlvtttp |
| | | aprpptpaptiasqplslrpeacrpaaggavhtrgldfacdiyiwaplagtcgvlllsl |
| | | vitlyckrgrkkllyifkqpfmrpvqttqeedgcscrfpeeeeggcelrvkfsrsadap |
| | | aykqgqnqlynelnlgrreeydvldkrrgrdpemggkprrknpqeglynelqkdkmaea |
| | | yseigmkgerrrgkghdglyqglstatkdtydalhmqalppr |
| 27 | PD-1 CAR | Atggccctccctgtcactgccctgcttctccccctcgcactcctgctccacgccgctag |
| | (na) | accacccggatggtttctggactctccggatcgcccgtggaatcccccaaccttctcac |
| | | cggcactcttggttgtgactgagggcgataatgcgaccttcacgtgctcgttctccaac |
| | | acctccgaatcattcgtgctgaactggtaccgcatgagcccgtcaaaccagaccgacaa |
| | | gctcgccgcgtttccggaagatcggtcgcaaccgggacaggattgtcggttccgcgtga |
| | | ctcaactgccgaatggcagagacttccacatgagcgtggtccgcgctaggcgaaacgac |
| | | tccgggacctacctgtgcggagccatctcgctggcgcctaaggcccaaatcaaagagag |
| | | cttgagggccgaactgagagtgaccgagcgcagagctgaggtgccaactgcacatccat |
| | | ccccatcgcctcggcctgcggggcagtttcagaccctggtcacgaccactccggcgccg |
| | | cgcccaccgactccggccccaactatcgcgagccagcccctgtcgctgaggccggaagc |
| | | atgccgccctgccgccggaggtgctgtgcatacccggggattggacttcgcatgcgaca |
| | | tctacatttgggctcctctcgccggaacttgtggcgtgctccttctgtccctggtcatc |
| | | accctgtactgcaagcggggtcggaaaaagcttctgtacattttcaagcagcccttcat |
| | | gaggcccgtgcaaaccacccaggaggaggacggttgctcctgccggttccccgaagagg |
| | | aagaaggaggttgcgagctgcgcgtgaagttctcccggagcgccgacgcccccgcctat |
| | | aagcagggccagaaccagctgtacaacgaactgaacctgggacggcgggaagagtacga |
| | | tgtgctggacaagcggcgcggccgggaccccgaaatgggcgggaagcctagaagaaaga |
| | | accctcaggaaggcctgtataacgagctgcagaaggacaagatggccgaggcctactcc |
| | | gaaattgggatgaagggagagcggcggaggggaaaggggcacgacggcctgtaccaagg |
| | | actgtccaccgccaccaaggacacatacgatgccctgcacatgcaggcccttccccctc |
| | | gc |
| 28 | linker | (Gly-Gly-Gly-Ser)ₙ, where n = 1-10 |
| 29 | linker | (Gly₄ Ser)₄ |
| 30 | linker | (Gly₄ Ser)3 |
| 31 | linker | (Gly₃Ser) |
| 32 | poly A | [a]₂₀₀₀ |
| | (2000 A's) | |
| 33 | poly A | [a]₁₅₀ |
| | (1500 A's) | |
| 34 | poly A | [a]₅₀₀₀ |
| | (5900 A's) | |
| 35 | poly A | [t]₁₀₀ |
| | (100 T's) | |
| 36 | poly A | [t]₅₀₀ |
| | (500 T's) | |
| 37 | poly A | [a]₆₄ |
| | (64 A's) | |
| 38 | poly A | [a]₄₀₀ |
| | (400 A's) | |
| 39 | PD1 CAR | Pgwfldspdrpwnpptfspallvvtegdnatftcsfsntsesfvlnwyrmspsnqtdkl |
| | (aa) | aafpedrsqpgqdcrfrvtqlpngrdfhmsvvrarrndsgtylcgaislapkaqikesl |
| | | raelrvterraevptahpspsprpagqfqtlvtttpaprpptpaptiasqplslrpeac |
| | | rpaaggavhtrgldfacdiyiwaplagtcgvlllslvitlyckrgrkkllyifkqpfmr |
| | | pvqttqeedgcscrfpeeeeggcelrvkfsrsadapaykqgqnqlynelnlgrreeydv |
| | | ldkrrgrdpemggkprrknpqeglynelqkdkmaeayseigmkgerrrgkghdglyqgl |
| | | statkdtydalhmqalppr |
| 40 | ICOS | T K K K Y S S S V H D P N G E Y M F M R A V N T A K K S R L |
| | intracellular | T D V T L |
| | domain (aa) | |
| 41 | ICOS | ACAAAAAAGAAGTATTCATCCAGTGTGCACGACCCTAACGGTGAATACATGTTCATGAG |
| | intracellular | AGCAGTGAACACAGCCAAAAAATCCAGACTCACAGATGTGACCCTA |
| | domain (na) | |
| 42 | ICOS TM | T T T P A P R P P T P A P T I A S Q P L S L R P E A C R P A |
| | domain (aa) | A G G A V H T R G L D F A C D F W L P I G C A A F V V V C I |
| | | L G C I L I C W L |
| 43 | ICOS TM | ACCACGACGCCAGCGCCGCGACCACCAACACCGGCGCCCACCATCGCGTCGCAGCCCCT |
| | domain (na) | GTCCCTGCGCCCAGAGGCGTGCCGGCCAGCGGCGGGGGGCGCAGTGCACACGAGGGGGC |
| | | TGGACTTCGCCTGTGATTTCTGGTTACCCATAGGATGTGCAGCCTTTGTTGTAGTCTGC |
| | | ATTTTGGGATGCATACTTATTTGTTGGCTT |
| 44 | CD28 | RSKRSRLLHSDYMNMTPRRPGPTRKHYQPYAPPRDFAAYRS |
| | intracellular | |
| | domain (aa) | |
| 45 | CD28 | AGGAGTAAGAGGAGCAGGCTCCTGCACAGTGACTACATGAACATGACTCCCCGCCGCCC |
| | intracellular | CGGGCCCACCCGCAAGCATTACCAGCCCTATGCCCCACCACGCGACTTCGCAGCCTATC |
| | domain (na) | GCTCC |

[0182] In specific aspects, a CAR construct of the invention (a CAR that binds to a B cell antigen or a CAR that binds to a tumor antigen) comprises a scFv domain, wherein the scFv may be preceded by an optional leader sequence such as provided in SEQ ID NO: 2, and followed by an optional hinge sequence such as provided in SEQ ID NO:4 or SEQ ID NO:6 or SEQ ID NO:8 or SEQ ID NO: 10, a transmembrane region such as provided in SEQ ID NO: 12, an intracellular signalling domain that includes SEQ ID NO: 14, SEQ ID NO: 16, SEQ ID NO: 42, or SEQ ID NO:44 and a CD3 zeta sequence that includes SEQ ID NO: 18 or SEQ ID NO:20, e.g., wherein the domains are contiguous with and in the same reading frame to form a single fusion protein.

[0183] In one aspect, an exemplary CAR constructs comprise an optional leader sequence (e.g., a leader sequence described herein), an extracellular antigen binding domain (e.g., an antigen binding domain described herein), a hinge (e.g., a hinge region described herein), a transmembrane domain (e.g., a transmembrane domain described herein), and an intracellular stimulatory domain (e.g., an intracellular stimulatory domain described herein). In one aspect, an exemplary CAR construct comprises an optional leader sequence (e.g., a leader sequence described herein), an extracellular antigen binding domain (e.g., an antigen binding domain described herein), a hinge (e.g., a hinge region described herein), a transmembrane domain (e.g., a transmembrane domain described herein), an intracellular costimulatory signaling domain (e.g., a costimulatory signaling domain described herein) and/or an intracellular primary signaling domain (e.g., a primary signaling domain described herein).

[0184] An exemplary leader sequence is provided as SEQ ID NO: 2. An exemplary hinge/spacer sequence is provided as SEQ ID NO: 4 or SEQ ID NO:6 or SEQ ID NO:8 or SEQ ID NO: 10. An exemplary transmembrane domain sequence is provided as SEQ ID NO: 12. An exemplary sequence of the intracellular signaling domain of the 4-1BB protein is provided as SEQ ID NO: 14. An exemplary sequence of the intracellular signaling domain of CD27 is provided as SEQ ID NO: 16. An exemplary sequence of the intracellular signaling domain of CD28 is provided as SEQ ID NO:42. An exemplary sequence of the intracellular signaling domain of CD28 is provided as SEQ ID NO:44. An exemplary CD3zeta domain sequence is provided as SEQ ID NO: 18 or SEQ ID NO:20.

[0185] The nucleic acid sequences coding for the desired molecules can be obtained using recombinant methods known in the art, such as, for example by screening libraries from cells expressing the nucleic acid molecule, by deriving the nucleic acid molecule from a vector known to include the same, or by isolating directly from cells and tissues containing the same, using standard techniques. Alternatively, the nucleic acid of interest can be produced synthetically, rather than cloned.

[0186] The present disclosure includes retroviral and lentiviral vector constructs expressing a CAR that can be directly transduced into a cell. Methods for viral transduction are described herein, and are well known in the art.

[0187] The present disclosure also includes an RNA construct that can be directly transfected into a cell. A method for generating mRNA for use in transfection involves in vitro transcription (IVT) of a template with specially designed primers, followed by polyA addition, to produce a construct containing 3′ and 5′ untranslated sequence (“UTR”) (e.g., a 3′ and/or 5′ UTR described herein), a 5′ cap (e.g., a 5′ cap described herein) and/or Internal Ribosome Entry Site (IRES) (e.g., an IRES described herein), the nucleic acid to be expressed, and a polyA tail, typically 50-2000 bases in length (SEQ ID NO:32). RNA so produced can efficiently transfect different kinds of cells. In one embodiment, the template includes sequences for the CAR In an embodiment, an RNA CAR vector is transfected into a cell, e.g., a T cell or a NK cell, by electroporation.

### Antigen Binding Domain

[0188] In one aspect, the CAR-expressing cells of the invention comprise a target-specific binding element otherwise referred to as an antigen binding domain. The choice of moiety depends upon the type and number of ligands that define the surface of a target cell. For example, the antigen binding domain may be chosen or engineered to recognize a ligand that acts as a cell surface marker on target cells associated with a particular disease state, e.g., a tumor antigen associated with a particular cancer (e.g., an antigen binding domain that binds to a tumor antigen). In other embodiments, the antigen binding domain is chosen or engineered to recognize normal B cells, or a subpopulation of B cells, for depleting normal B cells or a target B cell population (e.g., an antigen binding domain that binds to a B cell antigen).

[0189] The antigen binding domain can be any domain that binds to the antigen including but not limited to a monoclonal antibody, a polyclonal antibody, a recombinant antibody, a bispecific antibody, a conjugated antibody, a human antibody, a humanized antibody, and a functional fragment thereof, including but not limited to a single-domain antibody such as a heavy chain variable domain (VH), a light chain variable domain (VL) and a variable domain (VHH) of camelid derived nanobody, and to an alternative scaffold known in the art to function as antigen binding domain, such as a recombinant fibronectin domain, a T cell receptor (TCR), a recombinant TCR with enhanced affinity, or a fragment there of, e.g., single chain TCR, and the like. In some instances, it is beneficial for the antigen binding domain to be derived from the same species in which the CAR will ultimately be used in. For example, for use in humans, it may be beneficial for the antigen binding domain of the CAR to comprise human or humanized residues for the antigen binding domain of an antibody or antibody fragment.

### Tumor Antigens

[0190] The present disclosure provides immune effector cells (e.g., T cells, NK cells) that are engineered to contain one or more CARs that direct the immune effector cells to cancer cell. This is achieved through an antigen binding domain on the CAR that is specific for a tumor antigen. There are two classes of tumor antigens (tumor antigens) that can be targeted by the CARs of the instant invention: (1) a tumor antigen that is expressed on the surface of cancer cells; and (2) a tumor antigen that itself is intracellar, however, a fragment of such antigen (peptide) is presented on the surface of the cancer cells by MHC (major histocompatibility complex).

[0191] In one embodiment, the tumor antigen is expressed on both normal cells and cancer cells, but is expressed at lower levels on normal cells. In one embodiment, the method further comprises selecting a TA CAR that binds a tumor antigen with an affinity that allows the cell engineered to express the TA CAR to bind and kill the cancer cells expressing a tumor antigen but less than 30%, 25%, 20%, 15%, 10%, 5% or less of the normal cells expressing a tumor antigen are killed, e.g., as determined by an assay described herein. For example, a killing assay such as flow cytometry based on Cr51 CTL can be used. In one embodiment, the selected TA CAR has an antigen binding domain that has a binding affinity K_{D} of 10⁻⁴ M to 10⁻⁸ M, e.g., 10⁻⁵ M to 10⁻⁷ M, e.g., 10⁻⁶ M or 10⁻⁷ M, for the target antigen. In one embodiment, the selected antigen binding domain has a binding affinity that is at least five-fold, 10-fold, 20-fold, 30-fold, 50-fold, 100-fold or 1,000-fold less than a reference antibody, e.g., an antibody described herein.

[0192] Accordingly, the cells of the invention are engineered to express, e.g., express, a TA CAR comprising an antigen binding domain that can target, e.g., bind to, any one of the exemplary tumor antigens (tumor antigens): CD123, CD30, CD171, CS-1, CLL-1 (CLECL1), CD33, EGFRvIII, GD2, GD3, Tn Ag, sTn Ag, Tn-O-Glycopeptides, Stn-O-Glycopeptides, PSMA, FLT3, FAP, TAG72, CD44v6, CEA, EPCAM, B7H3, KIT, LL-13Ra2, Mesothelin, IL-11Ra, PSCA, VEGFR2, LewisY, PDGFR-beta, PRSS21, SSEA-4, Folate receptor alpha, ERBB2 (Her2/neu), MUC1, EGFR, NCAM, Prostase, PAP, ELF2M, Ephrin B2, IGF-1 receptor, CAIX, LMP2, gp100, bcr-abl, tyrosinase, EphA2, Fucosyl GM1, sLe, GM3, TGS5, HMWMAA, o-acetyl-GD2, Folate receptor beta, TEM1/CD248, TEM7R, CLDN6, TSHR, GPRC5D, CXORF61, CD97, CD179a, ALK, Plysialic acid, PLAC1, GloboH, NY-BR-1, UPK2, HAVCR1, ADRB3, PANX3, GPR20, LY6K, OR51E2, TARP, WT1, NY-ESO-1, LAGE-1a, legumain, HPV E6, E7, MAGE-A1, MAGE A1, ETV6-AML, sperm protein 17, XAGE1, Tie 2, MAD-CT-1, MAD-CT-2, Fos-related antigen 1, p53, p53 mutant, prostein, survivin and telomerase, PCTA-1/Galectin 8, MelanA/MARTI, Ras mutant, hTERT, sarcoma translocation breakpoints, ML-IAP, ERG (TMPRSS2 ETS fusion gene), NA17, PAX3, Androgen receptor, Cyclin B1, MYCN, RhoC, TRP-2, CYPIB1, BORIS, SART3, PAX5, OY-TES1, LCK, AKAP-4, SSX2, RAGE-1, human telomerase reverse transcriptase, RU1, RU2, intestinal carboxyl esterase, mut hsp70-2, LAIR1, FCAR, LILRA2, CD300LF, CLEC12A, BST2, EMR2, LY75, GPC3, FCRL5, IGLL1, and peptides of these antigens presented on MHC.

[0193] In embodiments, the antigen binding domain of a TA CAR, e.g., a TA CAR expressed by a cell of the invention, targets a tumor antigen that is associated with a solid tumor, e.g., expressed by a solid tumor cell, referred to herein as a solid tumor associated antigen, e.g., an antigen associated with mesothelioma (e.g., malignant pleural mesothelioma), lung cancer (e.g., non-small cell lung cancer, small cell lung cancer, squamous cell lung cancer, or large cell lung cancer), pancreatic cancer (e.g., pancreatic ductal adenocarcinoma), esophageal adenocarcinoma, ovarian cancer, breast cancer, colorectal cancer and bladder cancer or any combination thereof. In one embodiment, the disease is pancreatic cancer, e.g., metastatic pancreatic ductal adenocarcinoma (PDA), e.g., in a subject who has progressed on at least one prior standard therapy. In one embodiment, the disease is mesothelioma (e.g., malignant pleural mesothelioma), e.g., in a subject who has progressed on at least one prior standard therapy. In one embodiment, the disease is ovarian cancer, e.g., serous epithelial ovarian cancer, e.g., in a subject who has progressed after at least one prior regimen of standard therapy.

[0194] Examples of solid tumor associated antigens (i.e., solid tumor antigens) include, without limitation: EGFRvIII, mesothelin, GD2, Tn antigen, sTn antigen, Tn-O-Glycopeptides, sTn-O-Glycopeptides, PSMA, CD97, TAG72, CD44v6, CEA, EPCAM, KIT, IL-13Ra2, leguman, GD3, CD171, IL-11Ra, PSCA, MAD-CT-1, MAD-CT-2, VEGFR2, LewisY, CD24, PDGFR-beta, SSEA-4, folate receptor alpha, ERBBs (e.g., ERBB2), Her2/neu, MUC1, EGFR, NCAM, Ephrin B2, CAIX, LMP2, sLe, HMWMAA, o-acetyl-GD2, folate receptor beta, TEM1/CD248, TEM7R, FAP, Legumain, HPV E6 or E7, ML-IAP, CLDN6, TSHR, GPRC5D, ALK, Polysialic acid, Fos-related antigen, neutrophil elastase, TRP-2, CYPIB1, sperm protein 17, beta human chorionic gonadotropin, AFP, thyroglobulin, PLAC1, globoH, RAGE1, MN-CA IX, human telomerase reverse transcriptase, intestinal carboxyl esterase, mut hsp 70-2, NA-17, NY-BR-1, UPK2, HAVCR1, ADRB3, PANX3, NY-ESO-1, GPR20, Ly6k, OR51E2, TARP, GFRα4, and a peptide of any of these antigens presented on MHC.

[0195] In an embodiment, the antigen binding domain of a TA CAR, e.g., a TA CAR expressed by a cell of the invention, binds to human mesothelin. In an embodiment, the antigen binding domain is a murine scFv domain that binds to human mesothelin, e.g., SS1 or SEQ ID NO: 46. In an embodiment, the antigen binding domain is a humanized antibody or antibody fragment, e.g., scFv domain, derived from the murine SS1 scFv. In an embodiment, the antigen binding domain is a human antibody or antibody fragment that binds to human mesothelin. Exemplary human scFv domains (and their sequences) and the murine SS1 scFv that bind to mesothelin are provided in Table 2. CDR sequences are underlined. The scFv domain sequences provided in Table 2 include a light chain variable region (VL) and a heavy chain variable region (VH). The VL and VH are attached by a linker comprising the sequence GGGGSGGGGSGGGGS (SEQ ID NO: 30) (e.g., as shown in SS1 scFv domains) or GGGGSGGGGSGGGGSGGGGS (SEQ ID NO: 29) (e.g., as shown in M1, M2, M3, M4, M5, M6, M7, M8, M9, M10, M11, M12, M13, M14, M15, M16, M17, M18, M19, M20, M21, M22, M23, or M24 scFv domains). The scFv domains listed in Table 2 are in the following orientation: VL-linker-VH.

TABLE 2
Antigen binding domains that bind to mesothelin

| Tumor | | | SEQ |
|---|---|---|---|
| antigen | Name | Amino acid sequence | ID NO: |
| mesothelin | M5 | QVQLVQSGAEVEKPGASVKVSCKASGYTFTDYYMHWVRQAPGQGLEWMGW | 51 |
| | (human) | INPNSGGTNYAQKFQGRVTMTRDTSISTAYMELSRLRSDDTAVYYCASGW | |
| | | DFDYWGQGTLVTVSSGGGGSGGGGSGGGGSGGGGSDIVMTQSPSSLSASV | |
| | | GDRVTITCRASQSIRYYLSWYQQKPGKAPKLLIYTASILQNGVPSRFSGS | |
| | | GSGTDFTLTISSLQPEDFATYYCLQTYTTPDFGPGTKVEIK | |
| mesothelin | M11 | QVQLQQSGAEVKKPGASVKVSCKASGYTFTGYYMHWVRQAPGQGLEWMGW | 57 |
| | (human) | INPNSGGTNYAQNFQGRVTMTRDTSISTAYMELRRLRSDDTAVYYCASGW | |
| | | DFDYWGQGTLVTVSSGGGGSGGGGSGGGGSGGGGSDIRMTQSPSSLSASV | |
| | | GDRVTITCRASQSIRYYLSWYQQKPGKAPKLLIYTASILQNGVPSRFSGS | |
| | | GSGTDFTLTISSLQPEDFATYYCLQTYTTPDFGPGTKVEIK | |
| mesothelin | ss1 | Q V Q L Q Q S G P E L E K P G A S V K I S C K A S | 46 |
| | (murine) | G Y S F T G Y T M N W V K Q S H G K S L E W I G L | |
| | | I T P Y N G A S S Y N Q K F R G K A T L T V D K S | |
| | | S S T A Y M D L L S L T S E D S A V Y F C A R G G | |
| | | Y D G R G F D Y W G Q G T T V T V S S G G G G S G | |
| | | G G G S G G G G S D I E L T Q S P A I M S A S P G | |
| | | E K V T M T C S A S S S V S Y M H W Y Q Q K S G T | |
| | | S P K R W I Y D T S K L A S G V P G R F S G S G S | |
| | | G N S Y S L T I S S V E A E D D A T Y Y C Q Q W S | |
| | | G Y P L T F G A G T K L E I | |
| mesothelin | M1 | QVQLQQSGAEVKKPGASVKVSCKASGYTFTGYYMHWVRQAPGQGLEWMGR | 47 |
| | (human) | INPNSGGTNYAQKFQGRVTMTRDTSISTAYMELSRLRSEDTAVYYCARGR | |
| | | YYGMDVWGQGTMVTVSSGGGGSGGGGSGGGGSGGGGSEIVLTQSPATLSL | |
| | | SPGERATISCRASQSVSSNFAWYQQRPGQAPRLLIYDASNRATGIPPRFS | |
| | | GSGSGTDFTLTISSLEPEDFAAYYCHQRSNWLYTFGQGTKVDIK | |
| mesothelin | M2 | QVLQVQSGAEVKKPGASVKVSCKASGYTFTGYYMHWVRQAPGQGLEWMGW | 48 |
| | (human) | INPNSGGTNYAQKFQGRVTMTRDTSISTAYMELSRLRSDDTAVYYCARDL | |
| | | RRTVVTPRAYYGMDVWGQGTTVTVSSGGGGSGGGGSGGGGSGGGGSDIQL | |
| | | TQSPSTLSASVGDRVTITCQASQDISNSLNWYQQKAGKAPKLLIYDASTL | |
| | | ETGVPSRFSGSGSGTDFSFTISSLQPEDIATYYCQQHDNLPLTFGQGTKV | |
| | | EIK | |
| mesothelin | M3 | QVQLVQSGAEVKKPGAPVKVSCKASGYTFTGYYMHWVRQAPGQGLEWMGW | 49 |
| | (human) | INPNSGGTNYAQKFQGRVTMTRDTSISTAYMELSRLRSDDTAVYYCARGE | |
| | | WDGSYYYDYWGQGTLVTVSSGGGGSGGGGSGGGGSGGGGSDIVLTQTPSS | |
| | | LSASVGDRVTITCRASQSINTYLNWYQHKPGKAPKLLIYAASSLQSGVPS | |
| | | RFSGSGSGTDFTLTISSLQPEDFATYYCQQSFSPLTFGGGTKLEIK | |
| mesothelin | M4 | QVQLVESGGGLVQPGGSLRLSCAASGFTFSSYWMHWVRQVPGKGLVWVSR | 50 |
| | (human) | INTDGSTTTYADSVEGRFTISRDNAKNTLYLQMNSLRDDDTAVYYCVGGH | |
| | | WAVWGQGTTVTVSSGGGGSGGGGSGGGGSGGGGSDIQMTQSPSTLSASVG | |
| | | DRVTITCRASQSISDRLAWYQQKPGKAPKLLIYKASSLESGVPSRFSGSG | |
| | | SGTEFTLTISSLQPDDFAVYYCQQYGHLPMYTFGQGTKVEIK | |
| mesothelin | M6 | QVQLVQSGAEVKKPGASVKVSCKASGYFTFSYYMHWVRQAPGQGLEWMGI | 52 |
| | (human) | INPSGGSTSYAQKFQGRVTMTRDTATSTVYMELSSLRSEDTAVYYCARYR | |
| | | LIAVAGDYYYYGMDVWGQGTMVTVSSGGGGSGGGGSGGGGSGGGGSDIQM | |
| | | TQSPSSVASVGDRVTITCRASQGVGRWLAWYQQKPGTAPKLLIYAASTLQ | |
| | | SGVPSRFSGSGSGTDFTLTINNLQPEDFATYYCQQANSFPLTFGGGTRLE | |
| | | IK | |
| mesothelin | M7 | QVQLVQSGGGVVQPGRSLRLSCAASGFTFSSYAMHWVRQAPGKGLEWVAV | 53 |
| | (human) | ISYDGSNKYYADSVKGRFTISRDNSKNTLYLQMNSLRAEDTAVYYCARWK | |
| | | VSSSSPAFDYWGQGTLVTVSSGGGGSGGGGSGGGGSGGGGSEIVLTQSPA | |
| | | TLSLSPGERAILSCRASQSVYTKYLGWYQQKPGQAPRLLIYDASTRATGI | |
| | | PDRFSGSGSGTDFTLTINRLEPEDFAVYYCQHYGGSPLITFGQGTRLEIK | |
| mesothelin | M8 | QVQLQQSGAEVKKPGASVKVSCKTSGYPFTGYSLHWVRQAPGQGLEWMGW | 54 |
| | (human) | INPNSGGTNYAQKFQGRVTMTRDTSISTAYMELSRLRSDDTAVYYCARDH | |
| | | YGGNSLFYWGQGTLVTVSSGGGGSGGGGSGGGGSGGGGSDIQLTQSPSSI | |
| | | SASVGDTVSITCRASQDSGTWLAWYQQKPGKAPNLLMYDASTLEDGVPSR | |
| | | FSGSASGTEFTLTVNRLQPEDSATYYCQQYNSYPLTFGGGTKVDIK | |
| mesothelin | M9 | QVQLVQSGAEVKKPGASVEVSCKASGYTFTSYYMHWVRQAPGQGLEWMGI | 55 |
| | (human) | INPSGGSTGYAQKFQGRVTMTRDTSTSTVHMELSSLRSEDTAVYYCARGG | |
| | | YSSSSDAFDIWGQGTMVTVSSGGGGSGGGGSGGGGSGGGGSDIQMTQSPP | |
| | | SLSASVGDRVTITCRASQDISSALAWYQQKPGTPPKLLIYDASSLESGVP | |
| | | SRFSGSGSGTDFTLTISSLQPEDFATYYCQQFSSYPLTFGGGTRLEIK | |
| mesothelin | M10 | QVQLVQSGAEVKKPGASVKVSCKASGYTFTSYGISWVRQAPGQGLEWMGW | 56 |
| | (human) | ISAYNGNTNYAQKLQGRVTMTTDTSTSTAYMELRSLRSDDTAVYYCARVA | |
| | | GGIYYYYGMDVWGQGTTITVSSGGGGSGGGGSGGGGSGGGGSDIVMTQTP | |
| | | DSLAVSLGERATISCKSSHSVLYNRNNKNYLAWYQQKPGQPPKLLFYWAS | |
| | | TRKSGVPDRFSGSGSGTDFTLTISSLQPEDFATYFCQQTQTFPLTFGQGT | |
| | | RELIN | |
| mesothelin | M12 | QVQLVQSGAEVKKPGASVKVSCKASGYTFTGYYMHWVRQAPGQGLEWMGR | 58 |
| | (human) | INPNSGGTNYAQKFQGRVTMTTDTSTATAYMELRSLRSDDTAVYYCARTT | |
| | | TSYAFDIWGQGTMVTVSSGGGGSGGGGSGGGGSGGGGSDIQLTQSPSTLS | |
| | | ASVGDRVTITCRASQSISTWLAWYQQKPGKAPNLLIYKASTLESGVPSRF | |
| | | SGSGSGTEFTLTISSLQPDDFATYYCQQYNTYSPYTFGQGTKLEIK | |
| mesothelin | M13 | QVQLVQSGGGLVKPGGSLRLSCEASGFIFSDYYMGWIRQAPGKGLEWVSY | 59 |
| | (human) | IGRSGSSMYYADSVKGRFTFSRDNAKNSLYLQMNSLRAEDTAVYYCAASP | |
| | | VVAATEDFQHWGQGTLVTVSSGGGGSGGGGSGGGGSGGGGSDIVMTQTPA | |
| | | TLSLSPGERATLSCRASQSVTSNYLAWYQQKPGQAPRLLLFGASTRATGI | |
| | | PDRFSGSGSGTDFTLTINRLEPEDFAMYYCQQYGSAPVTFGQGTKLEIK | |
| mesothelin | M14 | QVQLVQSGAEVRAPGASVKISCKASGFTFRGYYIHWVRQAPGQGLEWMGI | 60 |
| | (human) | INPSGGSRAYAQKFQGRVTMTRDTSTSTVYMELSSLRSDDTAMYYCARTA | |
| | | SCGGDCYYLDYWGQGTLVTVSSGGGGSGGGGSGGGGSGGGGSDIQMTQSP | |
| | | PTLSASVGDRVTITCRASENVNIWLAWYQQKPGKAPKLLIYKSSSLASGV | |
| | | PSRFSGSGSGAEFTLTISSLQPDDFATYYCQQYQSYPLTFGGGTKVDIK | |
| mesothelin | M15 | QVQLVQSGGGLVQPGRSLRLSCAASGFTFDDYAMHWVRQAPGKGLEWVSG | 61 |
| | (human) | ISWNSGSIGYADSVKGRFTISRDNAKNSLYLQMNSLRAEDTAVYYCAKDG | |
| | | SSSWSWGYFDYWGQGTLVTVSGGGGSGGGGSGGGGSSSELTQPDPAVSVA | |
| | | LGQTVRTTCQGDALRSYYASWYQQKPGQAPMLVIYGKNNRPSGIPDRFSG | |
| | | SDSGDTASLTITGAQAEDEADYYCNSRDSSGYPVFGTGTKVTVL | |
| mesothelin | M16 | EVLQVESGGGLVQPGRSLRLSCAASGFTFDDYAMHWVRQAPGKGLEWVSG | 62 |
| | (human) | ISWNSGSTGYADSVKGRFTISRDNAKNSLYLQMNSLRAEDTALYYCAKDS | |
| | | SSWYGGGSAFDIWGQGTMVTVSSGGGGSGGGGSGGGGSSSELTQEPAVSV | |
| | | ALGQTVRITCQGDSLRSYYASWYQQKPGQAPVLVIFGRSRRPSGIPDRFS | |
| | | GSSSGNTASLIITGAQAEDEADYYCNSRDNTANHYVFGTGTKLTVL | |
| mesothelin | M17 | EVQLVESGGGLVQPGRSLRLSCAASGFTFDDYAMHWVRQAPGKGLEWVSG | 63 |
| | (human) | ISWNSGSTGYADSVKGRFTISRDNAKNSLYLQMNSLRAEDTALYYCAKDS | |
| | | SSWYGGGSAFDIWGQGTMVTVSSGGGGSGGGGSGGGGSSSELTQDPAVSV | |
| | | ALGQTVRITCQGDSLRSYYASWYQQKPGQAPVLVIYGKNNRPSGIPDRFS | |
| | | GSSSGNTASLTITGAQAEDEADYYCNSRGSSGNHYVFGTGTKVTVL | |
| mesothelin | M18 | QVQLVQSGGGLVQPGGSLRLSCAASGFTFSSYWMHWVRQAPGKGLVWVSR | 64 |
| | (human) | INSDGSSTSYADSVKGRFTISRDNAKNTLYLQMNSLRAEDTAVYYCVRTG | |
| | | WVGSYYYYMDVWGKGTTVTVSSGGGGSGGGGSGGGGSGGGGSEIVLTQSP | |
| | | GTLSLSPGERATLSCRASQSVSSNYLAWYQQKPGQPPRLLIYDVSTRATG | |
| | | IPARFSGGGSGTDFTLTISSLEPEDFAVYYCQQRSNWPPWTFGQGTKVEI | |
| | | K | |
| mesothelin | M19 | QVQLVQSGGGVVQPGRSLRLSCAASGFTFSSYGMHWVRQAPGKGLEWVAV | 65 |
| | (human) | ISYDGSNKYYADSVKGRFTISRDNSKNTLYLQMNSLRAEDTAVYYCAKGY | |
| | | SRYYYYGMDVWGQGTTVTVSSGGGGSGGGGSGGGGSGGGGSEIVMTQSPA | |
| | | TLSLSPGERAILSCRASQSVYTKYLGWYQQKPGQAPRLLIYDASTRATGI | |
| | | PDRFSGSGSGTDFTLTINRLEPEDFAVYYCQHYGGSPLITFGQGTKVDIK | |
| mesothelin | M20 | QVQLVQSGGGLVQPGGSLRLSCAASGFTFSSYAMSWVRQAPGKGLEWVSA | 66 |
| | (human) | ISGSGGSTYYADSVKGRFTISRDNSKNTLYLQMNSLRAEDTAVYYCAKRE | |
| | | AAAGHDWYFDLWGRGTLVTVSSGGGGSGGGGSGGGGSGGGGSDIRVTQSP | |
| | | SSLSASVGDRVTITCRASQSISSYLNWYQQKPGKAPKLLIYAASSLQSGV | |
| | | PSRFSGSGSGTDFTLTISSLQPEDFATYYCQQSYSIPLTFGQGTKVEIK | |
| mesothelin | M21 | QVQLVQSWAEVKKPGASVKVSCKASGYFTFSYYMHWVRQAPGQGLEWMGI | 67 |
| | (human) | INPSGGSTSYAQKFQGRVTMTRDTSTSTVYMELSNLRSEDTAVYYCARSP | |
| | | RVTTGYFDYWGQGTLVTVSSGGGGSGGGGSGGGGSGGGGSDIQLTQSPST | |
| | | LSASVGDRVTITCRASQSISSWLAWYQQKPGKAPKLLIYKASSLESGVPS | |
| | | RFSGSGSGTEFTLTISSLQPDDFATYYCQQYSSYPLTFGGGTRLEIK | |
| mesothelin | M22 | QVQLVQSGAEVRRPGASVKISCRASGDTSTRHYIHWLRQAPGQGPEWMGV | 68 |
| | (human) | INPTTGPATGSPAYAQMLQGRVTMTRDTSTRTVYMELRSLRFEDTAVYYC | |
| | | ARSVVGRSAPYYFDYWGQGTLVTVSSGGGGSGGGGSGGGGSGGGGSDIQM | |
| | | TQSPSSLSASVGDRVTITCRASQGSIDYSAWYQQKPGKAPKLLIYAASTL | |
| | | QSGVPSRFSGSGSGTDFTLTISYLQSEDFATYYCQQYYSYPLTFGGGTKV | |
| | | DIK | |
| mesothelin | M23 | QVQLQQSGAEVKKPGASVKVSCKASGYTFTNYYMHWVRQAPGQGLEWMGI | 69 |
| | (human) | INPSGGYTTYAQKFQGRLTMTRDTSTSTVYMELSSLRSEDTAVYYCARIR | |
| | | SCGGDCYYFDNWGQGTLVTVSSGGGGSGGGGSGGGGSGGGGSDIQLTQSP | |
| | | STLSASVGDRVTITCRASENVNIWLAWYQQKPGKAPKLLIYKSSSLASGV | |
| | | PSRFSGSGSGAEFTLTISSLQPDDFATYYCQQYQSYPLTFGGGTKVDIK | |
| mesothelin | M24 | QITLKESGPALVKPTQTLTLTCTFSGFSLSTAGVHVGWIRQPPGKALEWL | 70 |
| | (human) | ALISWADDKRYRPSLRSRLDITRVTSKDQVVLSMTNMQPEDTATYYCALQ | |
| | | GFDGYEANWGPGTLVTVSSGGGGSGGGGSGGGGSGGGGSDIVMTQSPSSL | |
| | | SASAGDRVTITCRASRGISSALAWYQQKPGKPPKLLIYDASSLESGVPSR | |
| | | FSGSGSGTDFTLTIDSLEPEDFATYYCQQSYSTPWTFGQGTKVDIK | |

[0196] The sequences of the CDR sequences of the scFv domains of the mesothelin antigen binding domains provided in Table 2 are shown in Table 3 for the heavy chain variable domains and in Table 4 for the light chain variable domains.

TABLE 3
Amino acid sequences for the heavy chain (HC) CDR1, CDR2,
and CDR3 regions of human anti-mesothelin scFvs

| | | SEQ | | SEQ | | SEQ |
|---|---|---|---|---|---|---|
| Descrip. | HC-CDR1 | ID NO: | HC-CDR2 | ID NO: | HC-CDR3 | ID NO: |
| M5 | GYTFTDYYMH | 115 | WINPNSGGTNYAQKFQG | 134 | GWDFDY | 159 |
| M11 | GYTFTGYYMH | 121 | WINPNSGGTNYAQNFQG | 141 | GWDFDY | 165 |
| Ss1 | GYSFTGYTMN | 132 | LITPYNGASSYNQKFRG | 154 | GGYDGRGFDY | 179 |
| M1 | GYTFTGYYMH | 113 | RINPNSGGTNYAQKFQG | 133 | GRYYGMDV | 155 |
| M2 | GYTFTGYYMH | 113 | WINPNSGGTNYAQKFQG | 134 | DLRRTVVTPRAYYGMDV | 156 |
| M3 | GYTFTGYYMN | 113 | WINPNSGGTNYAQKFQG | 134 | GEWDGSYYYDY | 157 |
| M4 | GFTFSSYWMH | 114 | RINTDGSTTTYADSVEG | 135 | GHWAV | 158 |
| M6 | GYTFTSYYMH | 116 | IINPSGGSTSYAQKFQ | 136 | YRLIAVAGDYYYYGMDV | 160 |
| M7 | GFTFSSYAMH | 117 | VISYDGSNKYYADSVKG | 137 | WKVSSSSPAFDY | 161 |
| M8 | GYPFTGYSLH | 118 | WINPNSGGTNYAQKFQG | 138 | DHYGGSNLFY | 162 |
| M9 | GYTFTSYYMH | 119 | IINPSGGSTGYAQKFQG | 139 | GGYSSSSDAFDI | 163 |
| M10 | GYTFTSYGIS | 120 | WASAYNGNTNYAQKLQ | 140 | VAGGIYYYYGMDV | 164 |
| M12 | GYTFTGYYMH | 121 | RINPNSGGTNYAQKFQG | 142 | TTTSYAFDI | 166 |
| M13 | GFIFSDYYMG | 122 | YIGRSGSSMYYADSVKG | 143 | SPVVAATEDFGH | 167 |
| M14 | GFTFRGYYIH | 123 | IINPSGGSRAYAQKFQG | 144 | TASCGGDCYYLDY | 168 |
| M15 | GFTFDDYAMH | 124 | GISWNSGSIGYADSVK | 145 | DGSSSWSWGYFDY | 169 |
| M16 | GFTFDDYAMH | 124 | GISWNSGSTGYADSVKG | 146 | DSSSWYGGGSAFDI | 170 |
| M17 | GFTFDDYAMH | 124 | GISWNSGSTGYADSVKG | 146 | DSSSWYGGGSAFDI | 171 |
| M18 | GFTFSSYWMH | 125 | RINSDGSSTSYADSVKG | 147 | TGWVGSYYYYMDV | 172 |
| M19 | GFTFSSYGMH | 126 | VISYDGSNKYYADSVKG | 148 | GYSRYYYYGMDV | 173 |
| M20 | GFTFSSYAMS | 127 | AISGSGGSTYYADSVKG | 149 | REAAAGHDWYFDL | 174 |
| M21 | GYTFTSYYMH | 128 | IINPSGGSTSYAQKFQG | 150 | SPRVTTGYFDY | 175 |
| M22 | GDTSTRHYIH | 129 | VINPTTGPATGSPAYAQMLQG | 151 | SVVGRSAPYYFDY | 176 |
| M23 | GYTFTNYYMH | 130 | IINPSGGYTTYAQKFQG | 152 | IRSCGGDCYYFDN | 177 |
| M24 | GFSLSTAGVHVG | 131 | LISWADDKRYRPSLRS | 153 | QGFDGYEAN | 178 |

TABLE 4
Amino acid sequences for the light chain (LC) CDR1,
CDR2, and CDR3 regions of human anti-mesothelin scFvs

| | | SEQ | | SEQ | | SEQ |
|---|---|---|---|---|---|---|
| Description | LC-CDR1 | ID NO: | LC-CDR2 | ID NO: | LC-CDR3 | ID NO: |
| M5 | RASQSIRYYLS | 184 | TASILQN | 203 | LQTYTTPD | 234 |
| M11 | RASQSIRYYLS | 190 | TASILQN | 215 | LQTYTTPD | 240 |
| Ss1 | SASSSVSYMH | 204 | DTSKLAS | 229 | QQWSGYPLT | 254 |
| M1 | RASQSVSSNFA | 180 | DASNRAT | 205 | HQRSNWLYT | 230 |
| M2 | QASQDISNSLN | 181 | DASTLET | 206 | QQHDNLPLT | 231 |
| M3 | RASQSINTYLN | 182 | AASSLQS | 207 | QQSFSPLT | 232 |
| M4 | RASQSISDRLA | 183 | KASSLES | 208 | QQYGHLPMYT | 233 |
| M6 | RASQGVGRWLA | 185 | AASTLQS | 210 | QQANSFPLT | 235 |
| M7 | RASQSVYTKYLG | 186 | DASTRAT | 211 | QHYGGSPLIT | 236 |
| M8 | RASQDSGTWLA | 187 | DASTLED | 212 | QQYNSYPLT | 237 |
| M9 | RASQDISSALA | 188 | DASSLES | 213 | QQFSSYPLT | 238 |
| M10 | KSSHSVLYNRNNKNYLA | 189 | WASTRKS | 214 | QQTQTFPLT | 239 |
| M12 | RASQSISTWLA | 191 | KASTLES | 216 | QQYNTYSPYT | 241 |
| M13 | RASQSVTSNYLA | 192 | GASTRAT | 217 | QQYGSAPVT | 242 |
| M14 | RASENVNIWLA | 193 | KSSSLAS | 218 | QQYQSYPLT | 243 |
| M15 | QGDALRSYYAS | 194 | GKNNRPS | 219 | NSRDSSGYPV | 244 |
| M16 | QGDSLRSYYAS | 195 | GRSRRPS | 220 | NSRDNTANHYV | 245 |
| M17 | QGDSLRSYYAS | 196 | GKNNRPS | 221 | NSRGSSGNHYV | 246 |
| M18 | RASQSVSSNYLA | 197 | DVSTRAT | 222 | QQRSNWPPWT | 247 |
| M19 | RASQSVYTKYLG | 198 | DASTRAT | 223 | QHYGGSPLIT | 248 |
| M20 | RASQSISSYLN | 199 | AASSLQS | 224 | QQSYSIPLT | 249 |
| M21 | RASQSISSWLA | 200 | KASSLES | 225 | QQYSSYPLT | 250 |
| M22 | RASQGISDYS | 201 | AASTLQS | 226 | QQYYSYPLT | 251 |
| M23 | RASENVNIWLA | 202 | KSSSLAS | 227 | QQYQSYPLT | 252 |
| M24 | RASRGISSALA | 203 | DASSLES | 228 | QQSYSTPWT | 253 |

[0197] Any known anti-mesothelin binding domain, from, for example, a known antibody, bispecific molecule or CAR, may be suitable for use in the TA CAR of the present invention. For example, the antigen binding domain against mesothelin is or may be derived from an antigen binding, e.g., CDRs or VH and VL, of an antibody, antigen-binding fragment or CAR described in, e.g., PCT publication WO2015/090230. In embodiments, the antigen binding domain against mesothelin is or is derived from an antigen binding portion, e.g., CDRs or VH and VL, of an antibody, antigen-binding fragment, or CAR described in, e.g., PCT publication WO1997/025068, WO1999/028471, WO2005/014652, WO2006/099141, WO2009/045957, WO2009/068204, WO2013/142034, WO2013/040557, or WO2013/063419.

[0198] In one embodiment, the mesothelin binding domain comprises one or more (e.g., all three) light chain complementary determining region 1 (LC CDR1), light chain complementary determining region 2 (LC CDR2), and light chain complementary determining region 3 (LC CDR3) of a mesothelin binding domain described herein, e.g., provided in Table 2 or 4, and/or one or more (e.g., all three) heavy chain complementary determining region 1 (HC CDR1), heavy chain complementary determining region 2 (HC CDR2), and heavy chain complementary determining region 3 (HC CDR3) of a mesothelin binding domain described herein, e.g., provided in Table 2 or 3. In one embodiment, the mesothelin binding domain comprises one, two, or all of LC CDR1, LC CDR2, and LC CDR3 of any amino acid sequences as provided in Table 4; and one, two or three of all of HC CDR1, HC CDR2 and HC CDR3, of any amino acid sequences as provided in Table 3.

[0199] In one embodiment, the mesothelin antigen binding domain comprises:
[0200] (i) (a) a LC CDR1 amino acid sequence of SEQ ID NO: 184, a LC CDR2 amino acid sequence of SEQ ID NO: 209, and a LC CDR3 amino acid sequence of SEQ ID NO: 234; and
[0201] (b) a HC CDR1 amino acid sequence of SEQ ID NO: 115, a HC CDR2 amino acid sequence of SEQ ID NO: 134, and a HC CDR3 amino acid sequence of SEQ ID NO: 159;
[0202] (ii) (a) a LC CDR1 amino acid sequence of SEQ ID NO: 190, a LC CDR2 amino acid sequence of SEQ ID NO: 215, and a LC CDR3 amino acid sequence of SEQ ID NO: 240; and
[0203] (b) a HC CDR1 amino acid sequence of SEQ ID NO: 121, a HC CDR2 amino acid sequence of SEQ ID NO: 141, and a HC CDR3 amino acid sequence of SEQ ID NO: 165;
[0204] (iii) (a) a LC CDR1 amino acid sequence of SEQ ID NO: 204, a LC CDR2 amino acid sequence of SEQ ID NO: 229, and a LC CDR3 amino acid sequence of SEQ ID NO: 254; and
[0205] (b) a HC CDR1 amino acid sequence of SEQ ID NO: 132, a HC CDR2 amino acid sequence of SEQ ID NO: 154, and a HC CDR3 amino acid sequence of SEQ ID NO: 179;
[0206] (iv) (a) a LC CDR1 amino acid sequence of SEQ ID NO: 180, a LC CDR2 amino acid sequence of SEQ ID NO: 205, and a LC CDR3 amino acid sequence of SEQ ID NO: 230; and
[0207] (b) a HC CDR1 amino acid sequence of SEQ ID NO: 113, a HC CDR2 amino acid sequence of SEQ ID NO: 133, and a HC CDR3 amino acid sequence of SEQ ID NO: 155;
[0208] (v) (a) a LC CDR1 amino acid sequence of SEQ ID NO: 181, a LC CDR2 amino acid sequence of SEQ ID NO: 206, and a LC CDR3 amino acid sequence of SEQ ID NO: 231; and
[0209] (b) a HC CDR1 amino acid sequence of SEQ ID NO: 113, a HC CDR2 amino acid sequence of SEQ ID NO: 134, and a HC CDR3 amino acid sequence of SEQ ID NO: 156;
[0210] (vi) (a) a LC CDR1 amino acid sequence of SEQ ID NO: 182, a LC CDR2 amino acid sequence of SEQ ID NO: 207, and a LC CDR3 amino acid sequence of SEQ ID NO: 232; and
[0211] (b) a HC CDR1 amino acid sequence of SEQ ID NO: 113, a HC CDR2 amino acid sequence of SEQ ID NO: 134, and a HC CDR3 amino acid sequence of SEQ ID NO: 157;
[0212] (vii) (a) a LC CDR1 amino acid sequence of SEQ ID NO: 183, a LC CDR2 amino acid sequence of SEQ ID NO: 208, and a LC CDR3 amino acid sequence of SEQ ID NO: 233; and
[0213] (b) a HC CDR1 amino acid sequence of SEQ ID NO: 114, a HC CDR2 amino acid sequence of SEQ ID NO: 135, and a HC CDR3 amino acid sequence of SEQ ID NO: 158;
[0214] (viii) (a) a LC CDR1 amino acid sequence of SEQ ID NO: 186, a LC CDR2 amino acid sequence of SEQ ID NO: 210, and a LC CDR3 amino acid sequence of SEQ ID NO: 235; and
[0215] (b) a HC CDR1 amino acid sequence of SEQ ID NO: 116, a HC CDR2 amino acid sequence of SEQ ID NO: 136, and a HC CDR3 amino acid sequence of SEQ ID NO: 160;
[0216] (ix) (a) a LC CDR1 amino acid sequence of SEQ ID NO: 186, a LC CDR2 amino acid sequence of SEQ ID NO: 211, and a LC CDR3 amino acid sequence of SEQ ID NO: 236; and
[0217] (b) a HC CDR1 amino acid sequence of SEQ ID NO: 117, a HC CDR2 amino acid sequence of SEQ ID NO: 137, and a HC CDR3 amino acid sequence of SEQ ID NO: 161;
[0218] (x) (a) a LC CDR1 amino acid sequence of SEQ ID NO: 187, a LC CDR2 amino acid sequence of SEQ ID NO: 212, and a LC CDR3 amino acid sequence of SEQ ID NO: 237; and
[0219] (b) a HC CDR1 amino acid sequence of SEQ ID NO: 118, a HC CDR2 amino acid sequence of SEQ ID NO: 138, and a HC CDR3 amino acid sequence of SEQ ID NO: 162;
[0220] (xi) (a) a LC CDR1 amino acid sequence of SEQ ID NO: 188, a LC CDR2 amino acid sequence of SEQ ID NO: 213, and a LC CDR3 amino acid sequence of SEQ ID NO: 238; and
[0221] (b) a HC CDR1 amino acid sequence of SEQ ID NO: 119, a HC CDR2 amino acid sequence of SEQ ID NO: 139, and a HC CDR3 amino acid sequence of SEQ ID NO: 163;
[0222] (xii) (a) a LC CDR1 amino acid sequence of SEQ ID NO: 189, a LC CDR2 amino acid sequence of SEQ ID NO: 214, and a LC CDR3 amino acid sequence of SEQ ID NO: 239; and
[0223] (b) a HC CDR1 amino acid sequence of SEQ ID NO: 120, a HC CDR2 amino acid sequence of SEQ ID NO: 140, and a HC CDR3 amino acid sequence of SEQ ID NO: 164;
[0224] (xiii) (a) a LC CDR1 amino acid sequence of SEQ ID NO: 191, a LC CDR2 amino acid sequence of SEQ ID NO: 216, and a LC CDR3 amino acid sequence of SEQ ID NO: 241; and
[0225] (b) a HC CDR1 amino acid sequence of SEQ ID NO: 121, a HC CDR2 amino acid sequence of SEQ ID NO: 142, and a HC CDR3 amino acid sequence of SEQ ID NO: 166;
[0226] (xiv) (a) a LC CDR1 amino acid sequence of SEQ ID NO: 192, a LC CDR2 amino acid sequence of SEQ ID NO: 217, and a LC CDR3 amino acid sequence of SEQ ID NO: 242; and
[0227] (b) a HC CDR1 amino acid sequence of SEQ ID NO: 122, a HC CDR2 amino acid sequence of SEQ ID NO: 143, and a HC CDR3 amino acid sequence of SEQ ID NO: 167;
[0228] (xv) (a) a LC CDR1 amino acid sequence of SEQ ID NO: 193, a LC CDR2 amino acid sequence of SEQ ID NO: 218, and a LC CDR3 amino acid sequence of SEQ ID NO: 243; and
[0229] (b) a HC CDR1 amino acid sequence of SEQ ID NO: 123, a HC CDR2 amino acid sequence of SEQ ID NO: 144, and a HC CDR3 amino acid sequence of SEQ ID NO: 168;
[0230] (xvi) (a) a LC CDR1 amino acid sequence of SEQ ID NO: 194, a LC CDR2 amino acid sequence of SEQ ID NO: 219, and a LC CDR3 amino acid sequence of SEQ ID NO: 244; and
[0231] (b) a HC CDR1 amino acid sequence of SEQ ID NO: 124, a HC CDR2 amino acid sequence of SEQ ID NO: 145, and a HC CDR3 amino acid sequence of SEQ ID NO: 169;
[0232] (xvii) (a) a LC CDR1 amino acid sequence of SEQ ID NO: 195, a LC CDR2 amino acid sequence of SEQ ID NO: 220, and a LC CDR3 amino acid sequence of SEQ ID NO: 245; and
[0233] (b) a HC CDR1 amino acid sequence of SEQ ID NO: 124, a HC CDR2 amino acid sequence of SEQ ID NO: 146, and a HC CDR3 amino acid sequence of SEQ ID NO: 170;
[0234] (xviii) (a) a LC CDR1 amino acid sequence of SEQ ID NO: 196, a LC CDR2 amino acid sequence of SEQ ID NO: 221, and a LC CDR3 amino acid sequence of SEQ ID NO: 246; and
[0235] (b) a HC CDR1 amino acid sequence of SEQ ID NO: 124, a HC CDR2 amino acid sequence of SEQ ID NO: 146, and a HC CDR3 amino acid sequence of SEQ ID NO: 171;
[0236] (xix) (a) a LC CDR1 amino acid sequence of SEQ ID NO: 197, a LC CDR2 amino acid sequence of SEQ ID NO: 222, and a LC CDR3 amino acid sequence of SEQ ID NO: 247; and
[0237] (b) a HC CDR1 amino acid sequence of SEQ ID NO: 125, a HC CDR2 amino acid sequence of SEQ ID NO: 147, and a HC CDR3 amino acid sequence of SEQ ID NO: 172;
[0238] (xx) (a) a LC CDR1 amino acid sequence of SEQ ID NO: 198, a LC CDR2 amino acid sequence of SEQ ID NO: 223, and a LC CDR3 amino acid sequence of SEQ ID NO: 248; and
[0239] (b) a HC CDR1 amino acid sequence of SEQ ID NO: 126, a HC CDR2 amino acid sequence of SEQ ID NO: 148, and a HC CDR3 amino acid sequence of SEQ ID NO: 173;
[0240] (xxi) (a) a LC CDR1 amino acid sequence of SEQ ID NO: 199, a LC CDR2 amino acid sequence of SEQ ID NO: 224, and a LC CDR3 amino acid sequence of SEQ ID NO: 249; and
[0241] (b) a HC CDR1 amino acid sequence of SEQ ID NO: 127, a HC CDR2 amino acid sequence of SEQ ID NO: 149, and a HC CDR3 amino acid sequence of SEQ ID NO: 174;
[0242] (xxii) (a) a LC CDR1 amino acid sequence of SEQ ID NO: 200, a LC CDR2 amino acid sequence of SEQ ID NO: 225, and a LC CDR3 amino acid sequence of SEQ ID NO: 250; and
[0243] (b) a HC CDR1 amino acid sequence of SEQ ID NO: 128, a HC CDR2 amino acid sequence of SEQ ID NO: 150, and a HC CDR3 amino acid sequence of SEQ ID NO: 175;
[0244] (xxiii) (a) a LC CDR1 amino acid sequence of SEQ ID NO: 201, a LC CDR2 amino acid sequence of SEQ ID NO: 226, and a LC CDR3 amino acid sequence of SEQ ID NO: 251; and
[0245] (b) a HC CDR1 amino acid sequence of SEQ ID NO: 129, a HC CDR2 amino acid sequence of SEQ ID NO: 151, and a HC CDR3 amino acid sequence of SEQ ID NO: 176;
[0246] (xxiv) (a) a LC CDR1 amino acid sequence of SEQ ID NO: 202, a LC CDR2 amino acid sequence of SEQ ID NO: 227, and a LC CDR3 amino acid sequence of SEQ ID NO: 252; and
[0247] (b) a HC CDR1 amino acid sequence of SEQ ID NO: 130, a HC CDR2 amino acid sequence of SEQ ID NO: 152, and a HC CDR3 amino acid sequence of SEQ ID NO: 177; or
[0248] (xxv) (a) a LC CDR1 amino acid sequence of SEQ ID NO: 203, a LC CDR2 amino acid sequence of SEQ ID NO: 228, and a LC CDR3 amino acid sequence of SEQ ID NO: 253; and
[0249] (b) a HC CDR1 amino acid sequence of SEQ ID NO: 131, a HC CDR2 amino acid sequence of SEQ ID NO: 153, and a HC CDR3 amino acid sequence of SEQ ID NO: 178.

[0250] In one embodiment, the mesothelin binding domain comprises a light chain variable region described herein (e.g., in Table 2) and/or a heavy chain variable region described herein (e.g., in Table 2). In one embodiment, the mesothelin binding domain is a scFv comprising a light chain and a heavy chain of an amino acid sequence listed in Table 2. In an embodiment, the mesothelin binding domain (e.g., an scFv) comprises: a light chain variable region comprising an amino acid sequence having at least one, two or three modifications (e.g., substitutions, e.g., conservative substitutions) but not more than 30, 20 or 10 modifications (e.g., substitutions, e.g., conservative substitutions) of an amino acid sequence of a light chain variable region provided in Table 2, or a sequence with 95-99% identity with an amino acid sequence provided in Table 2; and/or a heavy chain variable region comprising an amino acid sequence having at least one, two or three modifications (e.g., substitutions, e.g., conservative substitutions) but not more than 30, 20 or 10 modifications (e.g., substitutions, e.g., conservative substitutions) of an amino acid sequence of a heavy chain variable region provided in Table 2, or a sequence with 95-99%/o identity to an amino acid sequence provided in Table 2.

[0251] In one embodiment, the mesothelin binding domain comprises an amino acid sequence selected from a group consisting of SEQ ID NO: 46; SEQ ID NO: 47; SEQ ID NO: 48; SEQ ID NO: 49; SEQ ID NO: 50; SEQ ID NO: 51; SEQ ID NO: 52; SEQ ID NO: 53; SEQ ID NO: 54; SEQ ID NO: 55; SEQ ID NO: 56; SEQ ID NO: 57; SEQ ID NO: 58; SEQ ID NO: 59; SEQ ID NO: 60; SEQ ID NO: 61; SEQ ID NO: 62; SEQ ID NO: 63; SEQ ID NO: 64; SEQ ID NO: 65; SEQ ID NO: 66; SEQ ID NO: 67, SEQ ID NO: 68; SEQ ID NO: 69; and SEQ ID NO: 70; or an amino acid sequence having at least one, two or three modifications (e.g., substitutions, e.g., conservative substitutions) but not more than 30, 20 or 10 modifications (e.g., substitutions, e.g., conservative substitutions) to any of the aforesaid sequences; or a sequence with 95-99% identity to any of the aforesaid sequences. In one embodiment, the mesothelin binding domain is a scFv, and a light chain variable region comprising an amino acid sequence described herein, e.g., in Table 2, is attached to a heavy chain variable region comprising an amino acid sequence described herein, e.g., in Table 2, via a linker, e.g., a linker described herein. In one embodiment, the mesothelin binding domain includes a (Gly4-Ser)n linker, wherein n is 1, 2, 3, 4, 5, or 6, preferably 4 (SEQ ID NO: 80). The light chain variable region and heavy chain variable region of a scFv can be, e.g., in any of the following orientations: light chain variable region-linker-heavy chain variable region or heavy chain variable region-linker-light chain variable region.

[0252] In an embodiment, the antigen binding domain of a TA CAR, e.g., a TA CAR expressed by a cell of the invention, binds to human EGFRvIII. In an embodiment, the antigen binding domain is a murine scFv domain that binds to human EGFRvIII such as, e.g., mu310C. In an embodiment, the antigen binding domain is a humanized antibody or antibody fragment, e.g., scFv domain, derived from the murine mu310C scFv. Exemplary humanized scFv domains (and their sequences) and murine SS1 scFv that bind to EGFRvIII are provided in Table 5. In an embodiment, the antigen binding domain of a TA CAR, e.g., a TA CAR expressed by a cell of the invention, binds to human claudin 6 (CLDN6). In an embodiment, the antigen binding domain is a murine scFv domain that binds to human CLDN6. In an embodiment, the antigen binding domain is a humanized antibody or antibody fragment. Exemplary scFv domains (and their sequences) that bind to CLDN6 are provided in Table 5. The scFv domain sequences provided in Table 5 include a light chain variable region (VL) and a heavy chain variable region (VH). The VL and VH are attached by a linker comprising the sequence GGGGSGGGGSGGGGSGGGGS (SEQ ID NO: 29), e.g., in the following orientation: VL-linker-VH.

TABLE 5
Antigen binding domains that bind to the tumor antigen EGFRvIII

| Tumor | | | SEQ |
|---|---|---|---|
| antigen | Name | Amino acid sequence | ID NO: |
| EGFR | huscFv1 | Eiqlvqsgaevkkpgatvkisckgsgfniedyyihwvqqapgkglewmgridpendet | 71 |
| vIII | | kygpifqgrvtitadtstntvymelsslrsedtavyycafrggvywgqgttvtvssgg | |
| | | ggsggggsggggsggggsdvvmtqspdslavslgeratinckssqslldsdgktylnw | |
| | | lqqkpgqppkrlislvskldsgvpdrfsgsgsgtdftltisslqaedvavyycwqgth | |
| | | fpgtfgggtkveik | |
| EGFR | huscFv2 | Dvvmtqspdslavslgeratinckssqslldsdgktylnwlqqkpgqppkrlislvsk | 72 |
| vIII | | ldsgvpdrfsgsgsgtdftltisslqaedvavyycwqgthfpgtfgggtkveikgggg | |
| | | sggggsggggsggggseiqlvqsgaevkkpgatvkisckgsgfniedyyihwvqqapg | |
| | | kglewmgridpendetkygpifqgrvtitadtstntvymelsslrsedtavyycafrg | |
| | | gvywgqgttvtvss | |
| EGFR | huscFv3 | Eiqlvqsgaevkkpgeslrisckgsgfniedyyihwvrqmpgkglewmgridpendet | 73 |
| vIII | | kygpifqghvtisadtsintvylqwsslkasdtamyycafrggvywgqgttvtvssgg | |
| | | ggsggggsggggsggggsdvvmtqsplslpvtlgqpasisckssqslldsdgktylnw | |
| | | lqqrpgqsprrlislvskldsgvpdrfsgsgsgtdftlkisrveaedvgvyycwqgth | |
| | | fpgtfgggtkveik | |
| EGFR | huscFv4 | Dvvmtqsplslpvtlgqpasisckssqslldsdgktylnwlqqrpgqsprrlislvsk | 74 |
| vIII | | ldsgvpdrfsgsgsgtdftlkisrveaedvgvyycwqghtfpgtfgggtkveikgggg | |
| | | sggggsggggsggggseiqlvqsgaevkkpgeslrisckgsgfniedyyihwvrqmpg | |
| | | kglewvmgridpendetkygpifqghvtisadtsintvylqwsslkasdtamyycafr | |
| | | ggvywgqgttvtvss | |
| EGFR | huscFv5 | Eiqlvqsgaevkkpgatvkisckgsgfniedyyihwvqqapgkglewmgridpendet | 75 |
| vIII | | kygpifqgrvtitadtstntvymelsslrsedtavyycafrggvywgqgttvtvssgg | |
| | | ggsggggsggggsggggsdvvmtqsplslpvtlgqpasisckssqslldsdgktylnw | |
| | | lqqrpgqsprrlislvskldsgvpdrfsgsgsgtdftlkisrveaedvgvyycwqgth | |
| | | fpgtffftkveik | |
| EGFR | huscFv6 | Eiqlvqsgaevkkpgeslrisckgsgfniedyyihwvrqmpgkglewmgridpendet | 76 |
| vIII | | kygpifqghvtisadtsintvylqwsslkasdtamyycafrggvywgqgttvtvssgg | |
| | | ggsggggsggggsggggsdvvmtqspdslavslgeratinckssqslldsdgktylnw | |
| | | lqqkpgqppkrlislvskldsgvpdrfsgsgsgtdftltisslqaedvavyycwqgth | |
| | | fpgtfgggtkveik | |
| EGFR | huscFv7 | Dvvmtqspdslavslgeratinckssqslldsdgktylnwlqqkpgqppkrlislvsk | 77 |
| vIII | | ldsgvpdrfsgsgsgtdftltisslqaedvavyycwqgthfpgtfgggtkveikgggg | |
| | | sggggsggggsggggseiqlvqsgaevkkpgeslrisckgsgfniedyyihwvrqmpg | |
| | | kglewmgridpendetkygpifqghvtisadtsintvylqwsslkasdtamyycafrg | |
| | | gvywgqgttvtvss | |
| EGFR | huscFv8 | Dvvmtqsplslpvtlgqpasisckssqslldsdgktylnwlqqrpgpsprrlislvsk | 78 |
| vIII | | ldsgvpdrfsgsgsgtdftlkisrveaedvgvyycwqgthfpgtfgggtkveikgggg | |
| | | sggggsggggsggggseiqlvqsgaevkkpgatvkisckgsgfniedyyihwvqqapg | |
| | | kglewmgridpendetkygpifqgrvtitadtstntvymelsslrsedtavyycafrg | |
| | | gvywgqgttvtvss | |
| EGFR | Mu310C | eiqlqqsgaelvkpgasvklsctgsgfniedyyihwvkqrteqglewigridpendet | 79 |
| vIII | | kygpifqgratitadtssntvylqlssltsedtavyycafrggvywgpgttltvssgg | |
| | | ggsggggsggggshmdvvmtqspltlsvaigqsasisckssqslldsdgktylnwllq | |
| | | rpgqspkrlislvskldsgvpdrftgsgsgtdftlrisrveaedlgiyycwqghtfpg | |
| | | tfgggtkleik | |
| Claudin6 | muMAB | EVQLQQSGPELVKPGASMKISCKASGYSFTGYTMNWVKQSHGKNLEWIGLINPYNGGT | 98 |
| | 64A | IYNQKFKGKATLTVDKSSSTAYMELLSLTSEDSAVYYCARDYGFVLDYWGQGTTLTVS | |
| | | SGGGGSGGGGSGGGGSGGGGSQIVLTQSPSIMSVSPGEKVTITCSASSSVSYMHWFQQ | |
| | | KPGTSPKLCIYSTSNLASGVPARFSGRGSGTSYSLTISRVAAEDAATYYCQQRSNYPP | |
| | | WTFGGGTKLEIK | |
| Claudin6 | mAb206- | EVQLQQSGPELVKPGASMKISCKASGYSFTGYTMNWVKQSHGKNLEWIGLINPYNGGT | 99 |
| | LCC | IYNQKFKGKATLTVDKSSSTAYMELLSLTSEDSAVYYCARDYGFVLDYWGQGTTLTVS | |
| | | SGGGGSGGGGSGGGGSGGGGSQIVLTQSPAIMSASPGEKVTITCSASSSVSYLHWFQQ | |
| | | KPGTSPKLWVYSTSNLPSGVPARFGGSGSGTSYSLTISRMEAEDAATYYCQQRSIYPP | |
| | | WTFGGGTKLEIK | |
| Claudin6 | mAb206- | EVQLQQSGPELVKPGASMKISCKASGYSFTGYTMNWVKQSHGKNLEWIGLINPYNGGT | 100 |
| | SUBG | IYNQKFKGKATLTVDKSSSTAYMELLSLTSEDSAVYYCARDYGFVLDYWGQGTTLVTV | |
| | | SSGGGGSGGGGSGGGGSGGGGSQIVLTQSPSIMSVSPGEKVTITCSASSSVSYMHWFQ | |
| | | QKPGTSPKLGIYSTSNLASGVPARFSGRGSGTSYSLTISRVAAEDAATYYCQQRSNYP | |
| | | PWTFGGGTKLEIK | |

[0253] In one embodiment, the EGFRvIII binding domain comprises one or more (e.g., all three) light chain complementary determining region 1 (LC CDR1), light chain complementary determining region 2 (LC CDR2), and light chain complementary determining region 3 (LC CDR3) of an EGFRvIII binding domain described herein, e.g., provided in Table 5, and/or one or more (e.g., all three) heavy chain complementary determining region 1 (HC CDR1), heavy chain complementary determining region 2 (HC CDR2), and heavy chain complementary determining region 3 (HC CDR3) of an EGFRvIII binding domain described herein, e.g., provided in Table 5.

[0254] In one embodiment, the EGFRvII binding domain comprises a light chain variable region described herein (e.g., in Table 5) and/or a heavy chain variable region described herein (e.g., in Table 5). In one embodiment, the EGFRvIII binding domain is a scFv comprising a light chain and a heavy chain of an amino acid sequence listed in Table 5. In an embodiment, the EGFRvIII binding domain (e.g., an scFv) comprises: a light chain variable region comprising an amino acid sequence having at least one, two or three modifications (e.g., substitutions, e.g., conservative substitutions) but not more than 30, 20 or 10 modifications (e.g., substitutions, e.g., conservative substitutions) of an amino acid sequence of a light chain variable region provided in Table 5, or a sequence with 95-99% identity with an amino acid sequence provided in Table 5; and/or a heavy chain variable region comprising an amino acid sequence having at least one, two or three modifications (e.g., substitutions, e.g., conservative substitutions) but not more than 30, 20 or 10 modifications (e.g., substitutions, e.g., conservative substitutions) of an amino acid sequence of a heavy chain variable region provided in Table 5, or a sequence with 95-99% identity to an amino acid sequence provided in Table 5.

[0255] In one embodiment, the EGFRvIII binding domain comprises an amino acid sequence selected from a group consisting of SEQ ID NO: 71; SEQ ID NO: 72; SEQ ID NO: 73; SEQ ID NO: 74; SEQ ID NO: 75; SEQ ID NO: 76; SEQ ID NO: 77; SEQ ID NO: 78; and SEQ ID NO: 79; or an amino acid sequence having at least one, two or three modifications (e.g., substitutions, e.g., conservative substitutions) but not more than 30, 20 or 10 modifications (e.g., substitutions, e.g., conservative substitutions) to any of the aforesaid sequences; or a sequence with 95-99% identity to any of the aforesaid sequences. In one embodiment, the EGFRvIII binding domain is a scFv, and a light chain variable region comprising an amino acid sequence described herein, e.g., in Table 5, is attached to a heavy chain variable region comprising an amino acid sequence described herein, e.g., in Table 5, via a linker, e.g., a linker described herein. In one embodiment, the EGFRvIII binding domain includes a (Gly4-Ser)n linker, wherein n is 1, 2, 3, 4, 5, or 6, preferably 4 (SEQ ID NO: 80). The light chain variable region and heavy chain variable region of a scFv can be, e.g., in any of the following orientations: light chain variable region-linker-heavy chain variable region or heavy chain variable region-linker-light chain variable region.

[0256] In one embodiment, the claudin-6 binding domain comprises one or more (e.g., all three) light chain complementary determining region 1 (LC CDR1), light chain complementary determining region 2 (LC CDR2), and light chain complementary determining region 3 (LC CDR3) of an EGFRvIII binding domain described herein, e.g., provided in Table 5, and/or one or more (e.g., all three) heavy chain complementary determining region 1 (HC CDR1), heavy chain complementary determining region 2 (HC CDR2), and heavy chain complementary determining region 3 (HC CDR3) of an claudin-6 binding domain described herein, e.g., provided in Table 5.

[0257] In one embodiment, the claudin-6 binding domain comprises a light chain variable region described herein (e.g., in Table 5) and/or a heavy chain variable region described herein (e.g., in Table 5). In one embodiment, the claudin-6 binding domain is a scFv comprising a light chain and a heavy chain of an amino acid sequence listed in Table 5. In an embodiment, the claudin-6 binding domain (e.g., an scFv) comprises: a light chain variable region comprising an amino acid sequence having at least one, two or three modifications (e.g., substitutions, e.g., conservative substitutions) but not more than 30, 20 or 10 modifications (e.g., substitutions, e.g., conservative substitutions) of an amino acid sequence of a light chain variable region provided in Table 5, or a sequence with 95-99% identity with an amino acid sequence provided in Table 5; and/or a heavy chain variable region comprising an amino acid sequence having at least one, two or three modifications (e.g., substitutions, e.g., conservative substitutions) but not more than 30, 20 or 10 modifications (e.g., substitutions, e.g., conservative substitutions) of an amino acid sequence of a heavy chain variable region provided in Table 5, or a sequence with 95-99% identity to an amino acid sequence provided in Table 5.

[0258] In one embodiment, the claudin-6 binding domain comprises an amino acid sequence selected from a group consisting of SEQ ID NO: 98; SEQ ID NO: 99; and SEQ ID NO: 100; or an amino acid sequence having at least one, two or three modifications (e.g., substitutions, e.g., conservative substitutions) but not more than 30, 20 or 10 modifications (e.g., substitutions, e.g., conservative substitutions) to any of the aforesaid sequences; or a sequence with 95-99% identity to any of the aforesaid sequences. In one embodiment, the claudin-6 binding domain is a scFv, and a light chain variable region comprising an amino acid sequence described herein, e.g., in Table 5, is attached to a heavy chain variable region comprising an amino acid sequence described herein, e.g., in Table 5, via a linker, e.g., a linker described herein. In one embodiment, the claudin-6 binding domain includes a (Gly4-Ser)n linker, wherein n is 1, 2, 3, 4, 5, or 6, preferably 4 (SEQ ID NO: 80). The light chain variable region and heavy chain variable region of a scFv can be, e.g., in any of the following orientations: light chain variable region-linker-heavy chain variable region or heavy chain variable region-linker-light chain variable region.

[0259] In one embodiment, an antigen binding domain against GD2 is an antigen binding portion, e.g., CDRs, of an antibody described in, e.g., Mujoo et al., Cancer Res. 47(4):1098-1104 (1987); Cheung et al., Cancer Res 45(6):2642-2649 (1985), Cheung et al., J Clin Oncol 5(9):1430-1440 (1987), Cheung et al., J Clin Oncol 16(9):3053-3060 (1998), Handgretinger et al., Cancer Immunol Immunother 35(3):199-204 (1992). In some embodiments, an antigen binding domain against GD2 is an antigen binding portion of an antibody selected from mAb 14.18, 14G2a, ch14.18, hu14.18, 3F8, hu3F8, 3G6, 8B6, 60C3, 10B8, ME36.1, and 8H9, see e.g., WO2012033885, WO2013040371, WO2013192294, WO2013061273, WO2013123061, WO2013074916, and WO201385552. In some embodiments, an antigen binding domain against GD2 is an antigen binding portion of an antibody described in US Publication No.: 20100150910 or PCT Publication No.: WO 2011160119.

[0260] In one embodiment, an antigen binding domain against the Tn antigen, the sTn antigen, a Tn-O-glycopeptide antigen, or a sTn-O-glycopeptide antigen is an antigen binding portion, e.g., CDRs, of an antibody described in, e.g., US 2014/0178365, WO2015/120180, U.S. Pat. No. 8,440,798, EP 2083868 A2, Brooks et al., PNAS 107(22): 10056-10061 (2010), and Stone et al., Oncolmmunology 1(6):863-873(2012).

[0261] In one embodiment, an antigen binding domain against PSMA is an antigen binding portion, e.g., CDRs, of an antibody described in, e.g., Parker et al., Protein Expr Purif 89(2): 136-145 (2013), US 20110268656 (J591 ScFv); Frigerio et al, European J Cancer 49(9):2223-2232 (2013) (scFvD2B); WO 2006125481 (mAbs 3/A12, 3/E7 and 3/F11) and single chain antibody fragments (scFv A5 and D7).

[0262] In one embodiment, an antigen binding domain against CD97 is an antigen binding portion, e.g., CDRs, of an antibody described in, e.g., U.S. Pat. No. 6,846,911; de Groot et al., J Immunol 183(6):4127-4134 (2009); or an antibody from R&D:MAB3734.

[0263] In one embodiment, an antigen binding domain against TAG72 is an antigen binding portion, e.g., CDRs, of an antibody described in, e.g., Hombach et al., Gastroenterology 113(4):1163-1170 (1997); and Abcam ab691.

[0264] In one embodiment, an antigen binding domain against CD44v6 is an antigen binding portion, e.g., CDRs, of an antibody described in, e.g., Casucci et al., Blood 122(20):3461-3472 (2013).

[0265] In one embodiment, an antigen binding domain against CEA is an antigen binding portion, e.g., CDRs, of an antibody described in, e.g., Chmielewski et al., Gastoenterology 143(4): 1095-1107 (2012).

[0266] In one embodiment, an antigen binding domain against EPCAM is an antigen binding portion, e.g., CDRS, of an antibody selected from MT110, EpCAM-CD3 bispecific Ab (see, e.g., clinicaltrials.gov/ct2/show/NCT00635596); Edrecolomab; 3622W94; ING-1; and adecatumumab (MT201).

[0267] In one embodiment, an antigen binding domain against KIT is an antigen binding portion, e.g., CDRs, of an antibody described in, e.g., U.S. Pat. No. 7,915,391, US20120288506, and several commercial catalog antibodies.

[0268] In one embodiment, an antigen binding domain against IL-13Ra2 is an antigen binding portion, e.g., CDRs, of an antibody described in, e.g., WO2008/146911, WO2004087758, several commercial catalog antibodies, and WO2004087758.

[0269] In one embodiment, an antigen binding domain against CD171 is an antigen binding portion, e.g., CDRs, of an antibody described in, e.g., Hong et al., J Immunother 37(2):93-104 (2014).

[0270] In one embodiment, an antigen binding domain against PSCA is an antigen binding portion, e.g., CDRs, of an antibody described in, e.g., Morgenroth et al., Prostate 67(10): 1121-1131 (2007) (scFv 7F5); Nejatollahi et al., J of Oncology 2013(2013), article ID 839831 (scFv C5-II); and US Pat Publication No. 20090311181.

[0271] In one embodiment, an antigen binding domain against MAD-CT-2 is an antigen binding portion, e.g., CDRs, of an antibody described in, e.g., PMID: 2450952; U.S. Pat. No. 7,635,753.

[0272] In one embodiment, an antigen binding domain against Folate receptor alpha is an antigen binding portion, e.g., CDRs, of the antibody IMGN853, or an antibody described in US20120009181; U.S. Pat. No. 4,851,332, LK26: U.S. Pat. No. 5,952,484.

[0273] In one embodiment, an antigen binding domain against ERBB2 (Her2/neu) is an antigen binding portion, e.g., CDRs, of the antibody trastuzumab, or pertuzumab.

[0274] In one embodiment, an antigen binding domain against MUC1 is an antigen binding portion, e.g., CDRs, of the antibody SAR566658.

[0275] In one embodiment, the antigen binding domain against EGFR is antigen binding portion, e.g., CDRs, of the antibody cetuximab, panitumumab, zalutumumab, nimotuzumab, or matuzumab.

[0276] In one embodiment, an antigen binding domain against NCAM is an antigen binding portion, e.g., CDRs, of the antibody clone 2-2B: MAB5324 (EMD Millipore) In one embodiment, an antigen binding domain against CAIX is an antigen binding portion, e.g., CDRs, of the antibody clone 303123 (R&D Systems).

[0277] In one embodiment, an antigen binding domain against Fos-related antigen 1 is an antigen binding portion, e.g., CDRs, of the antibody 12F9 (Novus Biologicals).

[0278] In one embodiment, an antigen binding domain against SSEA-4 is an antigen binding portion, e.g., CDRs, of antibody MC813 (Cell Signaling), or other commercially available antibodies.

[0279] In one embodiment, an antigen binding domain against PDGFR-beta is an antigen binding portion, e.g., CDRs, of an antibody Abcam ab32570.

[0280] In one embodiment, an antigen binding domain against ALK is an antigen binding portion, e.g., CDRs, of an antibody described in, e.g., Mino-Kenudson et al., Clin Cancer Res 16(5):1561-1571 (2010).

[0281] In one embodiment, an antigen binding domain against plysialic acid is an antigen binding portion, e.g., CDRs, of an antibody described in, e.g., Nagae et al., J Biol Chem 288(47):33784-33796 (2013).

[0282] In one embodiment, an antigen binding domain against PLAC1 is an antigen binding portion, e.g., CDRs, of an antibody described in, e.g., Ghods et al., Biotechnol Appl Biochem 2013 doi:10.1002/bab.1177.

[0283] In one embodiment, an antigen binding domain against GloboH is an antigen binding portion of the antibody VK9; or an antibody described in, e.g., Kudryashov V et al, Glycoconj J. 15(3):243-9 (1998), Lou et al., Proc Natl Acad Sci USA 111(7):2482-2487 (2014); MBrl: Bremer E-G et al. J Biol Chem 259:14773-14777 (1984).

[0284] In one embodiment, an antigen binding domain against NY-BR-1 is an antigen binding portion, e.g., CDRs of an antibody described in, e.g., Jager et al., Appl Immunohistochem Mol Morphol 15(1):77-83 (2007).

[0285] In one embodiment, an antigen binding domain against sperm protein 17 is an antigen binding portion, e.g., CDRs, of an antibody described in, e.g., Song et al., Target Oncol 2013 Aug. 14 (PMID: 23943313), Song et al., Med Oncol 29(4):2923-2931 (2012).

[0286] In one embodiment, an antigen binding domain against TRP-2 is an antigen binding portion, e.g., CDRs, of an antibody described in, e.g., Wang et al, J Exp Med. 184(6):2207-16 (1996).

[0287] In one embodiment, an antigen binding domain against CYPB1 is an antigen binding portion, e.g., CDRs, of an antibody described in, e.g., Maecker et al, Blood 102 (9): 3287-3294 (2003).

[0288] In one embodiment, an antigen binding domain against RAGE-1 is an antigen binding portion, e.g., CDRs, of the antibody MAB5328 (EMD Millipore).

[0289] In one embodiment, an antigen binding domain against human telomerase reverse transcriptase is an antigen binding portion, e.g., CDRs, of the antibody cat no: LS-B95-100 (Lifespan Biosciences) In one embodiment, an antigen binding domain against intestinal carboxyl esterase is an antigen binding portion, e.g., CDRs, of the antibody 4F12: cat no: LS-B6190-50 (Lifespan Biosciences).

[0290] In one embodiment, an antigen binding domain against mut hsp70-2 is an antigen binding portion, e.g., CDRs, of the antibody Lifespan Biosciences: monoclonal: cat no: LS-C133261-100 (Lifespan Biosciences).

[0291] In one embodiment, an antigen binding domain against MAD-CT-2 is an antigen binding portion, e.g., CDRs, of an antibody described in, e.g., PMID: 2450952; U.S. Pat. No. 7,635,753.

[0292] In one embodiment, the antigen binding domain comprises one, two three (e.g., all three) heavy chain CDRs, HC CDR1, HC CDR2 and HC CDR3, from an antibody listed above, and/or one, two, three (e.g., all three) light chain CDRs, LC CDR1, LC CDR2 and LC CDR3, from an antibody listed above. In one embodiment, the antigen binding domain comprises a heavy chain variable region and/or a variable light chain region of an antibody listed above.

### Myeloid Tumor Antigens

[0293] The present disclosure provides immune effector cells (e.g., T cells, NK cells) that are engineered to contain (in addition to one or more BCA CAR molecules) one or more CAR molecules that target a tumor antigen. In one aspect the tumor antigen is an antigen expressed on a myeloid tumor (either a surface antigen or as a comples with MHC), and the cells of the invention comprise a CAR that recognizes a myeloid tumor antigen.

[0294] In an embodiment, the myeloid tumor antigen is an antigen that is preferentially or specifically expressed on the surface of a myeloid tumor cell.

[0295] The present disclosure provides CARs that can target the following myeloid tumor antigens: CD123, CD34, Flt3, CD33 and CLL-1. In embodiments, the myeloid tumor antigen is selected from CD123, CD33 and CLL-1. In embodiments, the myeloid tumor antigen is CD123. In embodiments, the myeloid tumor antigen is CD33. In embodiments, the myeloid tumor antigen is CD34. In embodiments, the myeloid tumor antigen is Flt3. In embodiments, the myeloid tumor antigen is CLL-1. In embodiments, the antigen binding domain targets the human antigen.

[0296] In one embodiment, the antigen-binding domain of a TA CAR, e.g., the TA CAR expressed by a cell of the invention (e.g., a cell that also expresses a BCA CAR), can be chosen such that a myeloid tumor population is targeted. Alternatively, when targeting of more than one type of myeloid tumor is desired, an antigen binding domain that targets a myeloid tumor antigen that is expressed by more than one, e.g., all, of the myeloid tumors to be targeted can be selected.

[0297] In one aspect, the antigen-binding domain of a TA CAR, e.g., the TA CAR expressed by a cell of the invention, binds to CD123, e.g., human CD123. Any known CD123 binding domain may be used in the invention. In one embodiment, an antigen binding domain against CD123 is an antigen binding portion, e.g., CDRs or VH and VL, of an antibody, antigen-binding fragment or CAR described in, e.g., PCT publication WO2014/130635. In one embodiment, an antigen binding domain against CD123 is an antigen binding portion, e.g., CDRs or VH and VL, of an antibody, antigen-binding fragment or CAR described in, e.g., PCT publication WO/2016/028896. In one embodiment, an antigen binding domain against CD123 is an antigen binding portion, e.g., CDRs, of an antibody, antigen-binding fragment, or CAR described in, e.g., PCT publication WO1997/024373, WO2008/127735 (e.g., a CD123 binding domain of 26292, 32701, 37716 or 32703), WO2014/138805 (e.g., a CD123 binding domain of CSL362), WO2014/138819, WO2013/173820, WO2014/144622, WO2001/66139, WO2010/126066 (e.g., the CD123 binding domain of any of Old4, Old5, Old17, Old19, New102, or Old6), WO2014/144622, or US2009/0252742. In embodiments, the antigen binding domain is or is derived from a murine anti-human CD123 binding domain. In embodiments, the antigen binding domain is a humanized antibody or antibody fragment, e.g., scFv domain. In an embodiment, the antigen binding domain is a human antibody or antibody fragment that binds to human CD123. In embodiments, the antigen binding domain is an scFv domain which includes a light chain variable region (VL) and a heavy chain variable region (VH). The VL and VH may attached by a linker described herein, e.g., comprising the sequence GGGGSGGGGSGGGGS (SEQ ID NO: 30), and may be in any orientation, e.g., VL-linker-VH, or VH-linker-VL.

[0298] In one aspect, the antigen-binding domain of a TA CAR, e.g., the TA CAR expressed by a cell of the invention, binds to CD33, e.g., human CD33. Any known CD33 binding domain may be used in the invention. In one embodiment, an antigen binding domain against CD33 is an antigen binding portion, e.g., CDRs or VH and VL, of an antibody, antigen-binding fragment or CAR described in, e.g., PCT publication WO2016/014576, the contents of which are incorporated herein in their entirety. In one embodiment, an antigen binding domain against CD33 is an antigen binding portion of or derived from Gemtuzumab ozogamicin (e.g., comprising an antigen binding domain comprising one or more, e.g., one, two, or three, CDRs of the heavy chain variable domain and/or one or more, e.g., one, two, or three, CDRs of the light chain variable domain, or the VH or VL, or the scFv sequence, of the scFv sequence of Gemtuzumab ozogamicin) (previously marketed as Mylotarg), e g., Bross et al., Clin Cancer Res 7(6):1490-1496 (2001) (Gemtuzumab Ozogamicin, hP67.6). In one embodiment, an antigen binding domain against CD33 is an antigen binding portion of or derived from (e.g., comprising an antigen binding domain comprising one or more, e.g., one, two, or three, CDRs of the heavy chain variable domain and/or one or more, e.g., one, two, or three, CDRs of the light chain variable domain, or the VH or VL, or the scFv sequence) of the scFv sequence encoded by GenBank reference no. AM402974.1 (See, Wang et al., Mol. Ther., vol. 23:1, pp. 184-191 (2015), hereby incorporated by reference. In one embodiment, an antigen binding domain against CD33 is an antigen binding portion, e.g., CDRs, of an antibody described in, e.g., Caron et al., Cancer Res 52(24):6761-6767 (1992) (Lintuzumab, HuM195), Lapusan et al., Invest New Drugs 30(3): 1121-1131 (2012) (AVE9633), Aigner et al., Leukemia 27(5): 1107-1115 (2013) (AMG330, CD33 BiTE), Dutour et al., Adv hematol 2012:683065 (2012), and Pizzitola et al., Leukemia doi: 10.1038/Lue.2014.62 (2014). In embodiments, the antigen binding domain is or is derived from a murine anti-human CD33 binding domain. In embodiments, the antigen binding domain is a humanized antibody or antibody fragment, e.g., scFv domain. In an embodiment, the antigen binding domain is a human antibody or antibody fragment that binds to human CD33. In embodiments, the antigen binding domain is an scFv domain which includes a light chain variable region (VL) and a heavy chain variable region (VH). The VL and VH may attached by a linker described herein, e.g., comprising the sequence GGGGSGGGGSGGGGS (SEQ ID NO: 30), and may be in any orientation, e.g., VL-linker-VH, or VH-linker-VL.

[0299] In one aspect, the antigen-binding domain of a TA CAR, e.g., the TA CAR expressed by a cell of the invention, binds to CLL-1, e.g., human CLL-1. Any known CLL-1 binding domain may be used in the invention. In one embodiment, an antigen binding domain against CLL-1 is an antigen binding portion, e.g., CDRs or VH and VL, of an antibody, antigen-binding fragment or CAR described in, e.g., PCT publication WO2016/014535, the contents of which are incorporated herein in their entirety. In one embodiment, an antigen binding domain against CLL-1 is an antigen binding portion, e.g., CDRs, of an antibody available from R&D, ebiosciences, Abcam, for example, PE-CLL1-hu Cat #353604 (BioLegend); and PE-CLL1 (CLEC12A) Cat #562566 (BD). In embodiments, the antigen binding domain is or is derived from a murine anti-human CLL-1 binding domain. In embodiments, the antigen binding domain is a humanized antibody or antibody fragment, e.g., scFv domain. In an embodiment, the antigen binding domain is a human antibody or antibody fragment that binds to human CLL-1. In embodiments, the antigen binding domain is an scFv domain which includes a light chain variable region (VL) and a heavy chain variable region (VH). The VL and VH may attached by a linker described herein, e.g., comprising the sequence GGGGSGGGGSGGGGS (SEQ ID NO: 30), and may be in any orientation, e.g., VL-linker-VH, or VH-linker-VL.

### B Cell Antigens

[0300] The present disclosure provides immune effector cells (e.g., T cells, NK cells) that are engineered to contain (in addition to one or more TA CAR molecules) one or more CAR molecules that target a B-Cell antigen. This is achieved through an antigen binding domain on the CAR that is specific for a B cell antigen. Such a CAR may be referred to herein as a BCA CAR.

[0301] In an embodiment, the B cell antigen is an antigen that is preferentially or specifically expressed on the surface of the B cell. The antigen can be expressed on the surface of any one of the following types of B cells: progenitor B cells (e.g., pre-B cells or pro-B cells), early pro-B cells, late pro-B cells, large pre-B cells, small pre-B cells, immature B cells, e.g., naïve B cells, mature B cells, plasma B cells, plasmablasts, memory B cells, B-1 cells, B-2 cells, marginal-zone B cells, follicular B cells, germinal center B cells, or regulatory B cells (Bregs).

[0302] The present disclosure provides CARs that can target the following B cell antigens: CD10, CD19, CD20, CD21, CD22, CD23, CD24, CD25, CD37, CD38, CD53, CD72, CD73, CD74, CD75, CD77, CD79a, CD79b, CD80, CD81, CD82, CD83, CD84, CD85, ROR1, BCMA, CD86, and CD179b. Other B cell antigens that can be targeted by a CAR described herein include: CD1a, CD1b, CD1c, CD1d, CD2, CD5, CD6, CD9, CD11a, CD11b, CD11c, CD17, CD18, CD26, CD27, CD29, CD30, CD31, CD32a, CD32b, CD35, CD38, CD39, CD40, CD44, CD45, CD45RA, CD45RB, CD45RC, CD45RO, CD46, CD47, CD48, CD49b, CD49c, CD49d, CD50, CD52, CD54, CD55, CD58, CD60a, CD62L, CD63, CD63, CD68 CD69, CD70, CD85E, CD85I, CD85J, CD92, CD95, CD97, CD98, CD99, CD100, CD102, CD108, CD119, CD120a, CD120b, CD121b, CD122, CD124, CD125, CD126, CD130, CD132, CD137, CD138, CD139, CD147, CD148, CD150, CD152, CD162, CD164, CD166, CD167a, CD170, CD175, CD175s, CD180, CD184, CD185, CD192, CD196, CD197, CD200, CD205, CD210a, CDw210b, CD212, CD213a1, CD213a2, CD215, CD217, CD218a, CD218b, CD220, CD221, CD224, CD225, CD226, CD227, CD229, CD230, CD232, CD252, CD253, CD257, CD258, CD261, CD262, CD263, CD264, CD267, CD268, CD269, CD270, CD272, CD274, CD275, CD277, CD279, CD283, CD289, CD290, CD295, CD298, CD300a, CD300c, CD305, CD306, CD307a, CD307b, CD307c, CD307d, CD307e, CD314, CD315, CD316, CD317, CD319, CD321, CD327, CD328, CD329, CD338, CD351, CD352, CD353, CD354, CD355, CD357, CD358, CD360, CD361, CD362, and CD363.

[0303] In another embodiment, the B cell antigen targeted by the BCA CAR is chosen from CD19, BCMA, CD20, CD22, FcRn5, FcRn2, CS-1 and CD138. In an embodiment, the B-Cell antigen targeted by the BCA CAR is CD19. In an embodiment, the B-Cell antigen targeted by the BCA CAR is CD20. In an embodiment, the B-Cell antigen targeted by the BCA CAR is CD22. In an embodiment, the B-Cell antigen targeted by the BCA CAR is BCMA. In an embodiment, the B-Cell antigen targeted by the BCA CAR is FcRn5. In an embodiment, the B-Cell antigen targeted by the BCA CAR is FcRn2. In an embodiment, the B-Cell antigen targeted by the BCA CAR is CS-1. In an embodiment, the B-Cell antigen targeted by the BCA CAR is CD138.

[0304] In one embodiment, the antigen-binding domain of a BCA CAR, e.g., the BCA CAR expressed by a cell of the invention (e.g., a cell that also expresses a TA CAR), can be chosen such that a preferred B cell population is targeted. For example, in an embodiment where targeting of B regulatory cells is desired, an antigen binding domain is selected that targets a B cell antigen that is expressed on regulatory B cells and not on other B cell populations, e.g., plasma B cells and memory B cells. Cell surface markers expressed on regulatory B cells include: CD19, CD24, CD25, CD38, or CD86, or markers described in He et al., 2014, J Immunology Research, Article ID 215471. When targeting of more than one type of B cells is desired, an antigen binding domain that targets a B cell antigen that is expressed by all of the B cells to be targeted can be selected.

[0305] In an embodiment, the antigen-binding domain of a BCA CAR, e.g., the BCA CAR expressed by a cell of the invention, binds to CD19. CD19 is found on B cells throughout differentiation of the lineage from the pro/pre-B cell stage through the terminally differentiated plasma cell stage. In an embodiment, the antigen binding domain is a murine scFv domain that binds to human CD19, e.g., CTL019 (e.g., SEQ ID NO: 95). In an embodiment, the antigen binding domain is a humanized antibody or antibody fragment, e.g., scFv domain, derived from the murine CTL019 scFv. In an embodiment, the antigen binding domain is a human antibody or antibody fragment that binds to human CD19. Exemplary scFv domains (and their sequences, e.g., CDRs, VL and VH sequences) that bind to CD19 are provided in Table 6. The scFv domain sequences provided in Table 6 include a light chain variable region (VL) and a heavy chain variable region (VH). The VL and VH are attached by a linker comprising the sequence GGGGSGGGGSGGGGS (SEQ ID NO: 30), e.g., in the following orientation: VL-linker-VH.

TABLE 6
Antigen binding domains that bind B cell antigen CD19

| B cell | | | |
|---|---|---|---|
| antigen | Name | Amino Acid Sequence | SEQ ID NO: |
| CD19 | muCTL | DIQMTQTTSSLSASLGDRVTISCRASQDISKYLNWYQQKPDGTVK | 95 |
| | 019 | LLIYHTSRLHSGVPSRFSGSGSGTDYSLTISNLEQEDIATYFCQQ | |
| | | GNTLPYTFGGGTKLEITGGGGSGGGGSGGGGSEVKLQESGPGLVA | |
| | | PSQSLSVTCTVSGVSLPDYGVSWIRQPPRKGLEWLGVIWGSETTY | |
| | | YNSALKSRLTIIKDNSKSQVFLKMNSLQTDDTAIYYCAKHYYYGG | |
| | | SYAMDYWGQGTSVTVSS | |
| CD19 | huscFv1 | EIVMTQSPATLSLSPGERATLSCRASQDISKYLNWYQQKPGQAPR | 83 |
| | | LLIHYTSRLHSGIPARFSGSGSGTDYTLTISSLQPEDFAVYFCQQ | |
| | | GNTLPYTFGQGTKLEIKGGGGSGGGGSGGGGSQVQLQESGPGLVK | |
| | | PSETLSLTCTVSGVSLPDYGVSWIRQPPGKGLEWIGVIWGSETTY | |
| | | YSSSLKSRVTISKDNSKNQVSLKLSSVTAADTAVYYCAKHYYYGG | |
| | | SYAMDYWGQGTLVTVSS | |
| CD19 | huscFv2 | EIVMTQSPATLSLSPGERATLSCRASQDISKYLNWYQQKPGQAPR | 84 |
| | | LLIYHTSRLHSGIPARFSGSGSGTDYTLTISSLQPEDFAVYVCQQ | |
| | | GNTLPYTFGQGTKLEIKGGGGSGGGGSGGGGSQVQLQESGPGLVK | |
| | | PSETLSLTCTVSGVSLPDYGVSWIRQPPGKGLEWIGVIWGSETTY | |
| | | YQSSLKSRVTISKDNSKNQVSLKLSSVTAADTAVYYCAKHYYYGG | |
| | | SYAMDYGQGTLVTVSS | |
| CD19 | huscFv3 | QVQLQESGPGLVKPSETLSLTCTVSGVSLPDYGVSWIRQPPGKGL | 85 |
| | | EWIGVIWGSETTYYSSSLKSRVTISKDNSKNQVSLKLSSVTAADT | |
| | | AVYYCAKHYYYGGSYAMDYWGQGTLVTVSSGGGGSGGGGSGGGGS | |
| | | EIVMTQSPATLSLSPGERATLSCRASQDISKYLNWYQQKPGQAPR | |
| | | LLIYHTSRLHSGIPARFSGSGSGTDYTLTISSLQPEDFAVYFCQQ | |
| | | GNTLPYTFGQGTKLEIK | |
| CD19 | huscFv4 | QVQLQESGPGLVKPSETLSLTCTVSGVSLPDYGVSWIRQPPGKGL | 86 |
| | | EWIGVIWGSETTYYQSSLKSRVTISDKNSKNQVSLKLSSVTAADT | |
| | | AVYYCAKHYYYGGSYAMDYWGQGTLVTVSSGGGGSGGGGSGGGGS | |
| | | EIVMTQSPATLSLSPGERATLSCRASQDISKYLNWYQQKPGQAPR | |
| | | LLIYHTSRLHSGIPARFSGSGSGTDYTLTISSLQPEDFAVYFCQQ | |
| | | GNTLPYTFGQGTKLEIK | |
| CD19 | huscFv5 | EIVMTQSPATLSLSPGERATLSCRASQDISKYLNWYQQKPGQAPR | 87 |
| | | LLIYHTSRLHSGIPARFSGSGSGTDYTLTISSLQPEDFAVYFCQQ | |
| | | GNTLPYTFGQGTKLEIKGGGGSGGGGSGGGGSGGGGSQVQLQESG | |
| | | PGLVKPSETLSLTCTVSGVSLPDYGVSWIRQPPGKGLEWIGVIWG | |
| | | SETTYYSSSLKSRVTISKDNSKNQVSLKLSSVTAADTAVYYCAKH | |
| | | YYYGGSYAMDYWGQGTLVTVSS | |
| CD19 | huscFv6 | EIVMTQSPATLSLSPGERATLSCRASQDISKYLNWYQQKPGQAPR | 88 |
| | | LLIYHTSRLHSGIPARFSGSGSGTDYTLTISSLQPEDFAVYFCQQ | |
| | | GNTLPYTFGQGTKLEIKGGGGSGGGGSGGGGSGGGGSQVQLQESG | |
| | | PGLVKPSETLSLTCTVSGVSLPDYGVSWIRQPPGKGLEWIGVIWG | |
| | | SETTYYQSSLKSRVTISKDNSKNQVSLKLSSVTAADTAVYYCAKH | |
| | | YYYGGSYAMDYWGQGTLVTVSS | |
| CD19 | huscFv7 | QVQLQESGPGLVKPSETLSLTCTVSGVSLPDYGVSWIRQPPGKGL | 89 |
| | | EWIGVIWGSETTYYSSSLKSRVTISKDNSKNQVSLKLSSVTAADT | |
| | | AVYYCAKHYYYGGSYAMDYWGQGTLVTVSSGGGGSGGGGSGGGGS | |
| | | GGGGSEIVMTQSPATLSLSPGERATLSCRASQDISKYLNWYQQKP | |
| | | GQAPRLLIYHTSRLHSGIPARFSGSGSGTDYTLTISSLQPEDFAV | |
| | | YFCQQGNTLPYTFGQGTKLEIK | |
| CD19 | huscFv8 | QVQLQESGPGLVKPSETLSLTCTVSGVSLPDYGVSWIRQPPGKGL | 90 |
| | | EWIGVIWGSETTYYQSSLKSRVTISKDNSKNQVSLKLSSVTAADT | |
| | | AVYYCAKHYYYGGSYAMDYWGQGTLVTVSSGGGGSGGGGSGGGGS | |
| | | GGGGSEIVMTQSPATLSLSPGERATLSCRASQDISKYLNWYQQKP | |
| | | GAPERLLIYHTSRLHSGIPARFSGSGSGTDYTLTISSLQPEDFAV | |
| | | YFCQQGNTLPYTFGQGTKLEIK | |
| CD19 | huscFv9 | EIVMTQSPATLSLSPGERATLSCRASQDISKYLNWYQQKPGQAPR | 91 |
| | | LLIYHTSRLHSGIPARFSGSGSGTDYTLTISSLQPEDFAVYFCQQ | |
| | | GNTLPYTFGQGTKLEIKGGGGSGGGGSGGGGSGGGGSQVQLQESG | |
| | | PGLVKPSETLSLTCTVSGVSLPDYGVSWIRQPPGKGLEWIGVIWG | |
| | | SETTYYNSSLKSRVTISKDNSKNQVSLKLSSVTAADTAVYYCAKH | |
| | | YYYGGSYAMDYWGOGTLVTVSS | |
| CD19 | Hu | QVQLQESGPGLVKPSETLSLTCTVSGVSLPDYGVSWIRQPPGKGL | 92 |
| | scFv10 | EWIGVIWGSETTYYNSSLKSRVTISKDNSKNQVSLKLSSVTAADT | |
| | | AVYYCAKHYYYGGSYAMDYWGQGTLVTVSSGGGGSGGGGSGGGGS | |
| | | GGGGSEIVMTQSPATLSLSPGERATLSCRASQDISKYLNWYQQKP | |
| | | GQAPRLLIYHTSRLHSGIPARFSGSGSGTDYTLTISSLQPEDFAV | |
| | | YFCQQGNTLPYTFGQGTKLEIK | |
| CD19 | Hu | EIVMTQSPATLSLSPGERATLSCRASQDISKYNLWYQQKPGQAPR | 93 |
| | scFv11 | LLIYHTSRLHSGIPARFSGSGSGTDYTLTISSLQEPDFAVYFCQQ | |
| | | GNTLPYTFGQGTKLEIKGGGGSGGGGSGGGGSQVQLQESGPGLVK | |
| | | PSETLSLTCTVSGVSLPDYGVSWIRQPPGKGLEWIGVIWGSETTY | |
| | | YNSSLKSRVTISKDNSKNQVSLKLSSVTAADTAVYYCAKHYYYGG | |
| | | SYAMDYWGQGTLVTVSS | |
| CD19 | Hu | QVQLQESGPGLVKPSETLSLTCTVSGVSLPDYGVSWIRQPPGKGL | 94 |
| | scFv12 | EWIGVIWGSETTYYNSSLKSRVTISKDNSKNQVSLKLSSVTAADT | |
| | | AVYYCAKHYYYGGSYAMDYWGQGTLVTVSSGGGGSGGGGSGGGGS | |
| | | EIVTMQSPATLSLSPGERATLSCRASQDISKYLNWYQQKPGQAPR | |
| | | LLIYHTSRLHSGIPARFSGSGSGTDYTLTISSLQPEDFAVYFCQQ | |
| | | GNTLPYTFGQGTKLEIK | |

[0306] The sequences of the CDR sequences of the scFv domains of the CD19 antigen binding domains provided in Table 6 are shown in Table 7 for the heavy chain variable domains and in Table 8 for the light chain variable domains. “ID” stands for the respective SEQ ID NO for each CDR.

TABLE 7
Heavy Chain Variable Domain CDRs

| Description | FW | HCDR1 | ID | HCDR2 | ID | HCDR3 | ID |
|---|---|---|---|---|---|---|---|
| murine_CART19 | | GVSLPDYGVS | 255 | VIWGSETTYYNSALKS | 256 | HYYYGGSYAMDY | 260 |
| humanized_CART19 a | VH4 | GCSLPDYGVS | 255 | VIWGSETTYY [symbol] S [symbol] LKS | 257 | HYYYGGSYAMDY | 260 |
| humanized_CART19 b | VH4 | GVSLPDYGVS | 255 | VIWGSETTYY [symbol] S [symbol] LKS | 258 | HYYYGGSYAMDY | 260 |
| humanized_CART19 c | VH4 | GVSLPDYGVS | 255 | VIWGSETTYYNS [symbol] LKS | 259 | HYYYGGSYAMDY | 260 |

TABLE 8
Light Chain Variable Domain CDRs

| Description | FW | CDR1 | ID | LCDR2 | ID | LCDR3 | ID |
|---|---|---|---|---|---|---|---|
| murine_CART19 | | RASQDISKYLN | 261 | HTSRLHS | 262 | QQGNTLPYT | 263 |
| humanized_CART19 a | VK3 | RASQDISKYLN | 261 | HTSRLHS | 262 | QQGNTLPYT | 263 |
| humanized_CART19 b | VK3 | RASQDISKYLN | 261 | HTSRLHS | 262 | QQGNTLPYT | 263 |
| humanized_CART19 c | VK3 | RASQDISKYLN | 261 | HTSRLHS | 262 | QQGNTLPYT | 263 |

[0307] In an embodiment, the antigen binding domain comprises an anti-CD19 antibody, or fragment thereof, e.g., an scFv. For example, the antigen binding domain comprises a variable heavy chain and a variable light chain listed in Table 9. The linker sequence joining the variable heavy and variable light chains can be any of the linker sequences described herein, or alternatively, can be GSTSGSGKPGSGEGSTKG (SEQ ID NO: 81). The light chain variable region and heavy chain variable region of a scFv can be, e.g., in any of the following orientations: light chain variable region-linker-heavy chain variable region or heavy chain variable region-linker-light chain variable region.

TABLE 9
Additional Anti-CD19 antibody binding domains

| Ab Name | VH Sequence | VL Sequence |
|---|---|---|
| SJ25-C1 | QVQLLESGAELVRPGSSVKISCKASGYAFSSYWMN | ELVLTQSPKFMSTSVGDRVSVTCKASQNVGTN |
| | WVKQRPGQGLEWIGQIYPGDGDTNYNGKFKGQATL | VAWYQQKPGQSPKPLIYSATRYNSGVPDRFTG |
| | TADKSSSTAYMQLSGLTSEDSAVYSCARKTISSVV | SGSGTDFTLTITNVQSKDLADYFYFCQYNRYP |
| | DFYFDYWGQGTTVT (SEQ ID NO: 96) | YTSGGGTKLEIKRRS (SEQ ID NO: 97) |

| | ScFv Sequence |
|---|---|
| SJ25-C1 | QVQLLESGAELVRPGSSVKISCKASGYAFSSYWMNWVKQRPGQGLEWIGQIYPGDGDTNYNGKFKGQA |
| scFv | TLTADKSSSTAYMQLSGLTSEDSAVYSCARKTISSVVDFYFDYGQGTTVTGSTSGSGKPGSGEGSTKG |
| | ELVLTQSPKFMSTSVGDRVSVTCKASQNVGTNVAWYQQKPGQSPKPLIYSATYRNSGVPDRFTGSGSG |
| | TDFTLTITNVQSKDLADYFYFCQYNRYPYTSGGGTKLEIKRRS (SEQ ID NO: 112) |

[0308] In one embodiment, the CD19 binding domain comprises one or more (e.g., all three) light chain complementary determining region 1 (LC CDR1), light chain complementary determining region 2 (LC CDR2), and light chain complementary determining region 3 (LC CDR3) of a CD19 binding domain described herein, e.g., provided in Table 6 or 7, and/or one or more (e.g., all three) heavy chain complementary determining region 1 (HC CDR1), heavy chain complementary determining region 2 (HC CDR2), and heavy chain complementary determining region 3 (HC CDR3) of a CD19 binding domain described herein, e.g., provided in Table 6 or 8. In one embodiment, the mesothelin binding domain comprises one, two, or all of LC CDR1, LC CDR2, and LC CDR3 of any amino acid sequences as provided in Table 8, incorporated herein by reference; and one, two or all of HC CDR1, HC CDR2, and HC CDR3 of any amino acid sequences as provided in Table 7.

[0309] In one embodiment, the CD19 antigen binding domain comprises:
[0310] (i) (a) a LC CDR1 amino acid sequence of SEQ ID NO: 261, a LC CDR2 amino acid sequence of SEQ ID NO: 262, and a LC CDR3 amino acid sequence of SEQ ID NO: 263; and
[0311] (b) a HC CDR1 amino acid sequence of SEQ ID NO: 255, a HC CDR2 amino acid sequence of SEQ ID NO: 256, and a HC CDR3 amino acid sequence of SEQ ID NO: 260
[0312] (ii) (a) a LC CDR1 amino acid sequence of SEQ ID NO: 261, a LC CDR2 amino acid sequence of SEQ ID NO: 262, and a LC CDR3 amino acid sequence of SEQ ID NO: 263; and
[0313] (b) a HC CDR1 amino acid sequence of SEQ ID NO: 255, a HC CDR2 amino acid sequence of SEQ ID NO: 257, and a HC CDR3 amino acid sequence of SEQ ID NO: 260;
[0314] (iii) (a) a LC CDR1 amino acid sequence of SEQ ID NO: 261, a LC CDR2 amino acid sequence of SEQ ID NO: 262, and a LC CDR3 amino acid sequence of SEQ ID NO: 263; and
[0315] (b) a HC CDR1 amino acid sequence of SEQ ID NO: 255, a HC CDR2 amino acid sequence of SEQ ID NO: 258, and a HC CDR3 amino acid sequence of SEQ ID NO: 260; or
[0316] (iv) (a) a LC CDR1 amino acid sequence of SEQ ID NO: 261, a LC CDR2 amino acid sequence of SEQ ID NO: 262, and a LC CDR3 amino acid sequence of SEQ ID NO: 263; and
[0317] (b) a HC CDR1 amino acid sequence of SEQ ID NO: 255, a HC CDR2 amino acid sequence of SEQ ID NO: 259, and a HC CDR3 amino acid sequence of SEQ ID NO: 260.

[0318] In one embodiment, the CD19 binding domain comprises a light chain variable region described herein (e.g., in Table 6 or 9) and/or a heavy chain variable region described herein (e.g., in Table 6 or 9). In one embodiment, the mesothelin binding domain is a scFv comprising a light chain and a heavy chain of an amino acid sequence listed in Table 3 or 4. In an embodiment, the CD19 binding domain (e.g., an scFv) comprises: a light chain variable region comprising an amino acid sequence having at least one, two or three modifications (e.g., substitutions, e.g., conservative substitutions) but not more than 30, 20 or 10 modifications (e.g., substitutions, e.g., conservative substitutions) of an amino acid sequence of a light chain variable region provided in Table 6 or 9, or a sequence with 95-99% identity with an amino acid sequence provided in Table 6 or 9; and/or a heavy chain variable region comprising an amino acid sequence having at least one, two or three modifications (e.g., substitutions, e.g., conservative substitutions) but not more than 30, 20 or 10 modifications (e.g., substitutions, e.g., conservative substitutions) of an amino acid sequence of a heavy chain variable region provided in Table 6 or 9, or a sequence with 95-99% identity to an amino acid sequence provided in Table 6 or 9.

[0319] In one embodiment, the CD19 binding domain comprises an amino acid sequence selected from a group consisting of SEQ ID NO: 83; SEQ ID NO: 84, SEQ ID NO: 85; SEQ ID NO: 86; SEQ ID NO: 87; SEQ ID NO: 88; SEQ ID NO: 89, SEQ ID NO: 90, SEQ ID NO: 91, SEQ ID NO: 92, SEQ ID NO: 93, SEQ ID NO: 94, SEQ ID NO: 95, and SEQ ID NO: 112; or an amino acid sequence having at least one, two or three modifications (e.g., substitutions, e.g., conservative substitutions) but not more than 30, 20 or 10 modifications (e.g., substitutions, e.g., conservative substitutions) to any of the aforesaid sequences; or a sequence with 95-99% identity to any of the aforesaid sequences. In one embodiment, the CD19 binding domain is a scFv, and a light chain variable region comprising an amino acid sequence described herein, e.g., in Table 6 or 9, is attached to a heavy chain variable region comprising an amino acid sequence described herein, e.g., in Table 6 or 9, via a linker, e.g., a linker described herein. In one embodiment, the CD19 binding domain includes a (Gly4-Ser)n linker, wherein n is 1, 2, 3, 4, 5, or 6, preferably 4 (SEQ ID NO: 80). The light chain variable region and heavy chain variable region of a scFv can be, e.g., in any of the following orientations: light chain variable region-linker-heavy chain variable region or heavy chain variable region-linker-light chain variable region.

[0320] Any known CD19 CAR, e.g., the CD19 antigen binding domain of any known CD19 CAR, in the art can be used in accordance with the instant invention to construct a CAR. For example, LG-740; CD19 CAR described in the U.S. Pat. Nos. 8,399,645; 7,446,190; Xu et al., Leuk Lymphoma. 2013 54(2):255-260(2012); Cruz et al., Blood 122(17):2965-2973 (2013); Brentjens et al., Blood, 118(18):4817-4828 (2011); Kochenderfer et al., Blood 116(20):4099-102 (2010); Kochenderfer et al., Blood 122 (25):4129-39(2013); and 16th Annu Meet Am Soc Gen Cell Ther (ASGCT) (May 15-18, Salt Lake City) 2013, Abst 10. In one embodiment, an antigen binding domain against CD19 is an antigen binding portion, e.g., CDRs, of a CAR, antibody or antigen-binding fragment thereof described in, e.g., PCT publication WO2012/079000; PCT publication WO2014/153270; Kochenderfer, J. N. et al., J. Immunother. 32 (7), 689-702 (2009); Kochenderfer, J. N., et al., Blood, 116 (20), 4099-4102 (2010); PCT publication WO2014/031687; Bejcek, Cancer Research, 55, 2346-2351, 1995; or U.S. Pat. No. 7,446,190.

[0321] In an embodiment, the antigen-binding domain of a BCA CAR, e.g., the BCA CAR expressed by a cell of the invention, binds to BCMA. BCMA is found preferentially expressed in mature B lymphocytes. In an embodiment, the antigen binding domain is a murine scFv domain that binds to human BCMA. In an embodiment, the antigen binding domain is a humanized antibody or antibody fragment, e.g., scFv domain, that binds human BCMA. In an embodiment, the antigen binding domain is a human antibody or antibody fragment that binds to human BCMA. Exemplary scFv domains (and their sequences, e.g., CDRs, VL and VH sequences) that bind to BCMA are provided in Table 12, Table 13, Table 14 and Table 15. The scFv domain sequences provided in Table 12 and Table 13 include a light chain variable region (VL) and a heavy chain variable region (VH). The VL and VH are attached by a linker, e.g., in the following orientation: VH-linker-VL.

TABLE 12
Antigen Binding domains that bind the B-Cell antigen BCMA
The amino acid sequences variable heavy chain and variable light
chain sequences for each scFv is also provided.

| | | |
|---|---|---|
| Name/ | | |
| Description | SEQ ID NO: | Sequence |

139109

| | | |
|---|---|---|
| 139109-aa | 349 | EVQLVESGGGLVQPGGSLRLSCAVSGFALSNHGMSWVRRAPGKGL |
| ScFv | | EWVSGIVYSGSTYYAASVKGRFTISRDNSRNTLYLQMNSLRPEDT |
| domain | | AIYYCSAHGGESDVWGQGTTVTVSSASGGGGSGGRASGGGGSDIQ |
| | | LTQSPSSLSASVGDRVTITCRASQSISSYLNWYQQKPGKAPKLLI |
| | | YAASSLQSGVPSRFSGSGSGTDFTLTISSLQPEDFATYYCQQSYS |
| | | TPYTFGQGTKVEIK |
| 139109-nt | 364 | GAAGTGCAATTGGTGGAATCAGGGGGAGGACTTGTGCAGCCTGGA |
| ScFv | | GGATCGCTGAGACTGTCATGTGCCGTGTCCGGCTTTGCCCTGTCC |
| domain | | AACCACGGGATGTCCTGGGTCCGCCGCGCGCCTGGAAAGGGCCTC |
| | | GAATGGGTGTCGGGTATTGTGTACAGCGGTAGCACCTACTATGCC |
| | | GCATCCGTGAAGGGGAGATTCACCATCAGCCGGGACAACTCCAGG |
| | | AACACTCTGTACCTCCAAATGAATTCGCTGAGGCCAGAGGACACT |
| | | GCCATCTACTACTGCTCCGCGCATGGCGGAGAGTCCGACGTCTGG |
| | | GGACAGGGGACCACCGTGACCGTGTCTAGCGCGTCCGGCGGAGGC |
| | | GGCAGCGGGGGTCGGGCATCAGGGGGCGGCGGATCGGACATCCAG |
| | | CTCACCCAGTCCCCGAGCTCGCTGTCCGCCTCCGTGGGAGATCGG |
| | | GTCACCATCACGTGCCGCGCCAGCCAGTCGATTTCCTCCTACCTG |
| | | AACTGGTACCAACAGAAGCCCGGAAAAGCCCCGAAGCTTCTCATC |
| | | TACGCCGCCTCGAGCCTGCAGTCAGGAGTGCCCTCACGGTTCTCC |
| | | GGCTCCGGTTCCGGTACTGATTTCACCCTGACCATTTCCTCCCTG |
| | | CAACCGGAGGACTTCGCTACTTACTACTGCCAGCAGTCGTACTCC |
| | | ACCCCCTACACTTTCGGACAAGGCACCAAGGTCGAAATCAAG |
| 139109-aa | 379 | EVQLVESGGGLVQPGGSLRLSCAVSGFALSNHGMSWVRRAPGKGL |
| VH | | EWVSGIVYSGSTYYAASVKGRFTISRDNSRNTLYLQMNSLRPEDT |
| | | AIYYCSAHGGESDVWGQGTTVTVSS |
| 139109-aa | 394 | DIQLTQSPSSLSASVGDRVTITCRASQSISSYLNWYQQKPGKAPK |
| VL | | LLIYAASSLQSGVPSRFSGSGSGTDFTLTISSLQPEDFATYYCQQ |
| | | SYSTPYTFGQGTKVEIK |

139103

| | | |
|---|---|---|
| 139103-aa | 339 | QVQLVESGGGLVQPGRSLRLSCAASGFTFSNYAMSWVRQAPGKGL |
| ScFv | | GWVSGISRSGENTYYADSVKGRFTISRDNSKKTLYLQMNSLRDED |
| domain | | TAVYYCARSPAHYYGGMDVWGQGTTVTVSSASGGGGSGGRASGGG |
| | | GSDIVLTQSPGTLSLSPGERATLSCRASQSISSSFLAWYQQKPGQ |
| | | APRLLIYGASRRATGIPDRFSGSGSGTDFTLTISRLEPEDSAVYY |
| | | CQGYHSSPSWTFGQGTKLEIK |
| 139103-nt | 354 | CAAGTGCAACTCGTGGAATCTGGTGGAGGACTCGTGCAACCCGGA |
| ScFv | | AGATCGCTTAGACTGTCGTGTGCCGCCAGCGGGTTCACTTTCTCG |
| domain | | AACTACGCGATGTCCTGGGTCCGCCAGGCACCCGGAAAGGGACTC |
| | | GGTTGGGTGTCCGGCATTTCCCGGTCCGGCGAAAATACCTACTAC |
| | | GCCGACTCCGTGAAGGGCCGCTTCACCATCTCAAGGGACAACAGC |
| | | AAAAACACCCTGTACTTGCAAATGAACTCCCTGCGGGATGAAGAT |
| | | ACAGCCGTGTACTATTGCGCCCGGTCGCCTGCCCATTACTACGGC |
| | | GGAATGGACGTCTGGGGACAGGGAACCACTGTGACTGTCAGCAGC |
| | | GCGTCGGGTGGCGGCGGCTCAGGGGGTCGGGCCTCCGGGGGGGGA |
| | | GGGTCCGACATCGTGCTGACCCAGTCCCCGGGAACCCTGAGCCTG |
| | | AGCCCGGGAGAGCGCGCGACCCTGTCATGCCGGGCATCCCAGAGC |
| | | ATTAGCTCCTCCTTTCTCGCCTGGTATCAGCAGAAGCCCGGACAG |
| | | GCCCCGAGGCTGCTGATCTACGGCGCTAGCAGAAGGGCTACCGGA |
| | | ATCCCAGACCGGTTCTCCGGCTCCGGTTCCGGGACCGATTTCACC |
| | | CTTACTATCTCGCGCCTGGAACCTGAGGACTCCGCCGTCTACTAC |
| | | TGCCAGCAGTACCACTCATCCCCGTCGTGGACGTTCGGACAGGGC |
| | | ACCAAGCTGGAGATTAAG |
| 139103-aa | 369 | QVQLVESGGGLVQPGRSLRLSCAASGFTFSNYAMSWVRQAPGKGL |
| VH | | GWVSGISRSGENTYYADSVKGRFTISRDNSKNTLYLQMNSLRDED |
| | | TAVYYCARSPAHYYGGMDVWGQGTTVTVSS |
| 139103-aa | 384 | DIVLTQSPGTLSLSPGERATLSCRASQSISSSLFAWYQQKPGQAP |
| VL | | RLLIYGASRRATGIPDRFSGSGSGTDFTLTISRLEPEDSAVYYCQ |
| | | QYHSSPSWTFGQGTKLEIK |

139105

| | | |
|---|---|---|
| 139105-aa | 340 | QVQLVESGGGLVQPGRSLRLSCAASGFTFDDYQMHWVRQAPGKGL |
| ScFv | | EWVSGISWNSGSIGYADSVKGRFTISRDNAKNSLQLQMNSLRAED |
| domain | | TALYYCSVHSFLAYWGQGTLVTVSSASGGGGSGGRASGGGGSDIV |
| | | MTQTPLSLPVTPGEPASISCRSSQSLLHSNGYNYLDWYLKQPGQS |
| | | PQLLIYLGSNRASGVPDRFSGSGSGTDFTLKISRVEAEDVGVYYC |
| | | MQALQTPYTFGQGTKVEIK |
| 139105-nt | 355 | CAAGTGCAACTCGTCGAATCCGGTGGAGGTCTGGTCCAACCTGGT |
| ScFv | | AGAAGCCTGAGACTGTCGTGTGCGGCCAGCGGATTCACCTTTGAT |
| domain | | GACTATGCTATGCACTGGGTGCGGCAGGCCCCAGGAAAGGGCCTG |
| | | GAATGGGTGTCGGGAATTAGCTGGAACTCCGGGTCCATTGGCTAC |
| | | GCCGACTCCGTGAAGGGCCGCTTCACCATCTCCCGCGACAACGCA |
| | | AAGAACTCCCTGTACTTGCAAATGAACTCGCTCAGGGCTGAGGAT |
| | | ACCGCGCTGTACTACTGCTCCGTGCATTCCTTCCTGGCCTACTGG |
| | | GGACAGGGAACTCTGGTCACCGTGTCGAGCGCCTCCGGCGGCGGG |
| | | GGCTCGGGTGGACGGGCCTCGGGCGGAGGGGGGTCCGACATCGTG |
| | | ATGACCCAGACCCCGCTGAGCTTGCCCGTGACTCCCGGAGAGCCT |
| | | GCATCCATCTCCTGCCGGTCATCCCAGTCCCTTCTCCACTCCAAC |
| | | GGATACAACTACCTCGACTGGTACCTCCAGAAGCCGGGACAGAGC |
| | | CCTCAGCTTCTGATCTACCTGGGGTCAAATAGAGCCTCAGGAGTG |
| | | CCGGATCGGTTCAGCGGATCTGGTTCGGGAACTGATTTCACTCTG |
| | | AAGATTTCCCGCGTGGAAGCCGAGGACGTGGGCGTCTACTACTGT |
| | | ATGCAGGCGCTGCAGACCCCCTATACCTTCGGCCAAGGGACGAAA |
| | | GTGGAGATCAAG |
| 139105-aa | 370 | QVQLVESGGGLVQPGRSLRLSCAASGFTFDDYAMHWVRQAPGKGL |
| VH | | EWVSGISWNSGSIGYADSVKGRFTISRDNAKNSLYLQMNSLRAED |
| | | TALYYCSVHSFLAYWGQGTLVTVSS |
| 139105-aa | 385 | DIVMTQTPLSLPVTPGEPASISCRSSQSLLHSNGYNYLDWYLQKP |
| VL | | GQSPQLLIYLGSNRASGVPDRFSGSGSGTDFTLKISRVEAEDVGV |
| | | YYCMQALQTPYTFGQGTKVEIK |

139111

| | | |
|---|---|---|
| 139111-aa | 341 | EVQLLESGGGLVQPGGSLRLSCAVSGFALSNHGMSWVRRAPGKGL |
| ScFv | | EWVSGIVYSGSTYYAASVKGRFTISRDNSRNTLYLQMNSLRPEDT |
| domain | | AIYYCSAHGGESDVWGQGTTVTVSSASGGGGSGGRASGGGGSDIV |
| | | MTQTPLSLSVTPGQPASISCKSSQSLLRNDGKTPLYWYLQKAGQP |
| | | PQLLIYEVSNRFSGVPDRFSGSGSGTDFTLKISRVEAEDVGAYYC |
| | | MQNIQFPSFGGGTKLEIK |
| 139111-nt | 356 | GAAGTGCAATTGTTGGAATCTGGAGGAGGACTTGTGCAGCCTGGA |
| ScFv | | GGATCACTGAGACTTTCGTGTGCGGTGTCAGGCTTCGCCCTGAGC |
| domain | | AACCACGGCATGAGCTGGGTGCGGAGAGCCCCGGGGAAGGGTCTG |
| | | GAATGGGTGTCCGGGATCGTCTACTCCGGTTCAACTTACTACGCC |
| | | GCAAGCGTGAAGGGTCGCTTCACCATTTCCCGCGATAACTCCCGG |
| | | AACACCCTGTACCTCCAAATGAACTCCCTGCGGCCCGAGGACACC |
| | | GCCATCTACTACTGTTCCGCGCATGGAGGAGAGTCCGATGTCTGG |
| | | GGACAGGGCACTACCGTGACCGTGTCGAGCGCCTCGGGGGGAGGA |
| | | GGCTCCGGCGGTCGCGCCTCCGGGGGGGGTGGCAGCGACATTGTG |
| | | ATGACGCAGACTCCACTCTCGCTGTCCGTGACCCCGGGACAGCCC |
| | | GCGTCCATCTCGTGCAAGAGCTCCCAGAGCCTGCTGAGGAACGAC |
| | | GGAAAGACTCCTCTGTATTGGTACCTCCAGAAGGCTGGACAGCCC |
| | | CCGCAACTGCTCATCTACGAAGTGTCAAATCGCTTCTCCGGGGTG |
| | | CCGGATCGGTTTTCCGGCTCGGGATCGGGCACCGACTTCACCCTG |
| | | AAAATCTCCAGGGTCGAGGCCGAGGACGTGGGAGCCTACTACTGC |
| | | ATGCAAAACATCCAGTTCCCTTCCTTCGGCGGCGGCACAAAGCTG |
| | | GAGATTAAG |
| 139111-aa | 371 | EVQLLESGGGLVQPGGSLRLSCAVSGFALSNHGMSWVRRAPGKGL |
| VH | | EWVSGIVYSGSTYYAASVKGRFTISRDNSRNTLYLQMNSLRPEDT |
| | | AIYYCSAHGGESDVWGQGTTVTVSS |
| 139111-aa | 386 | DIVMTQTPLSLSVTPGQPASISCKSSQSLLRNDGKTPLYWYLQKA |
| VL | | GQPPQLLIYEVSNRFSGVPDRFSGSGSGTDFTLKISRVEAEDVGA |
| | | YYCMQNIQFPSFGGGTKLEIK |

139100

| | | |
|---|---|---|
| 139100-aa | 342 | QVQLVQSGAEVRKTGASVKVSCKASGYIFDNFGINWVRQAPGQGL |
| ScFv | | EWMGWINPKNNNTNYAQKFQGRVTITADESTNTAYMEVSSLRSED |
| domain | | TAVYYCARGPYYYQSYMDVWGQGTMVTVSSASGGGGSGGRASGGG |
| | | GSDIVMTQTPLSLPVTPGEPASISCRSSQSLLHSNGYNYLNWYLQ |
| | | KPGQSPQLLIYLGSKRASGVPDRFSGSGSGTDFTLHITRVGAEDV |
| | | GVYYCMQALQTPYTFGQGTKLEIK |
| 139100-nt | 357 | CAAGTCCAACTCGTCCAGTCCGGCGCAGAAGTCAGAAAAACCGGT |
| ScFv | | GCTAGCGTGAAAGTGTCCTGCAAGGCCTCCGGCTACATTTTCGAT |
| domain | | AACTTCGGAATCAACTGGGTCAGACAGGCCCCGGGCCAGGGGCTG |
| | | GAATGGATGGGATGGATCAACCCCAAGAACAACAACACCAACTAC |
| | | GCACAGAAGTTCCAGGGCCGCGTGACTATCACCGCCGATGAATCG |
| | | ACCAATACCGCCTACATGGAGGTGTCCTCCCTGCGGTCGGAGGAC |
| | | ACTGCCGTGTATTACTGCGCGAGGGGCCCATACTACTACCAAAGC |
| | | TACATGGACGTCTGGGGACAGGGAACCATGGTGACCGTGTCATCC |
| | | GCCTCCGGTGGTGGAGGCTCCGGGGGGCGGGCTTCAGGAGGCGGA |
| | | GGAAGCGATATTGTGATGACCCAGACTCCGCTTAGCCTGCCCGTG |
| | | ACTCCTGGAGAACCGGCCTCCATTTCCTGCCGGTCCTCGCAATCA |
| | | CTCCTGCATTCCAACGGTTACAACTACCTGAATTGGTACCTCCAG |
| | | AAGCCTGGCCAGTCGCCCCAGTTGCTGATCTATCTGGGCTCGAAG |
| | | CGCGCCTCCGGGGTGCCTGACCGGTTTAGCGGATCTGGGAGCGGC |
| | | ACGGACTTCACTCTCCACATCACCCGCGTGGGAGCGGAGGACGTG |
| | | GGAGTGTACTACTGTATGCAGGCGCTGCAGACTCCGTACACATTC |
| | | GGACAGGGCACCAAGCTGGAGATCAAG |
| 139100-aa | 372 | QVQLVQSGAEVRKTGASVKVSCKASGYIFDNFGINWVRQAPGQGL |
| VH | | EWMGWINPKNNNTNYAQKFQGRVTITADESTNTAYMEVSSLRSED |
| | | TAVYYCARGPYYYQSYMDVWGQGTMVTVSS |
| 139100-aa | 387 | DIVMTQTPLSLPVTPGEPASISCRSSQSLLHSNGYNYLNWYLQKP |
| VL | | GQSPQLLIYLGSKRASGVPDRFSGSGSGTDFTLHITRVGAEDVGV |
| | | YYCMQALQTPYTFGQGTKLEIK |

139101

| | | |
|---|---|---|
| 139101-aa | 343 | QVQLQESGGGLVQPGGSLRLSCAASGFTFSSDAMTWVRQAPGKGL |
| ScFv | | EWVSVISGSGGTTYYADSVKGRFTISRDNSKNTLYLQMNSLRAED |
| domain | | TAVYYCAKLDSSGYYYARGPRYWGQGTLVTVSSASGGGGSGGRAS |
| | | GGGGSDIQLTQSPSSLSASVGDRVTITCRASQSISSYLNWYQQKP |
| | | GKAPKLLIYGASTLASGVPARFSGSGSGTHFTLTINSLQSEDSAT |
| | | YYCQQSYKRASFGQGTKVEIK |
| 139101-nt | 358 | CAAGTGCAACTTCAAGAATCAGGCGGAGGACTCGTGCAGCCCGGA |
| ScFv | | GGATCATTGCGGCTCTCGTGCGCCGCCTCGGGCTTCACCTTCTCG |
| domain | | AGCGACGCCATGACCTGGGTCCGCCAGGCCCCGGGGAAGGGGCTG |
| | | GAATGGGTGTCTGTGATTTCCGGCTCCGGGGGAACTACGTACTAC |
| | | GCCGATTCCGTGAAAGGTCGCTTCACTATCTCCCGGGACAACAGC |
| | | AAGAACACCCTTTATCTGCAAATGAATTCCCTCCGCGCCGAGGAC |
| | | ACCGCCGTGTACTACTGCGCCAAGCTGGACTCCTCGGGCTACTAC |
| | | TATGCCCGGGGTCCGAGATACTGGGGACAGGGAACCCTCGTGACC |
| | | GTGTCCTCCGCGTCCGGCGGAGGAGGGTCGGGAGGGCGGGCCTCC |
| | | GGCGGCGGCGGTTCGGACATCCAGCTGACCCAGTCCCCATCCTCA |
| | | CTGAGCGCAAGCGTGGGCGACAGAGTCACCATTACATGCAGGGCG |
| | | TCCCAGAGCATCAGCTCCTACCTGAACTGGTACCAACAGAAGCCT |
| | | GGAAAGGCTCCTAAGCTGTTGATCTACGGGGCTTCGACCCTGGCA |
| | | TCCGGGGTGCCCGCGAGGTTTAGCGGAAGCGGTAGCGGCACTCAC |
| | | TTCACTCTGACCATTAACAGCCTCCAGTCCGAGGATTCAGCCACT |
| | | TACTACTGTCAGCAGTCCTACAAGCGGGCCAGCTTCGGACAGGGC |
| | | ACTAAGGTCGAGATCAAG |
| 139101-aa | 373 | QVQLQESGGGLVQPGGSLRLSCAASGFTFSSDAMTWCRQAPGKGL |
| VH | | EWVSVISGSGGTTYYADSVKGRFTISRDNSKNTLYLQMNSLRAED |
| | | TAVYYCAKLDSSGYYYARGPRYWGQGTLVTVSS |
| 139101-aa | 388 | DIQLTQSPSSLSASVGDRVTITCRASQSISSYLNWYQQKPGKAPK |
| VL | | LLIYGASTLASGVPARFSGSGSGTHFTLTINSLQSEDSATYYCQQ |
| | | SYKRASFGQGTKVEIK |

139102

| | | |
|---|---|---|
| 139102-aa | 344 | QVQLVQSGAEVKKPGASVKVSCKASGYTFSNYGITWVRQAPGQGL |
| ScFv | | EWMGWISAYNGNTNYAQKFQGRVTMTRNTSISTAYMELSSLRSED |
| domain | | TAVYYCARGPYYYYMDVWGKGTMVTVSSASGGGGSGGRASGGGGS |
| | | EIVMTQSPLSLPVTPGEPASISCRSSQSLLYSNGYNYVDWYLQKP |
| | | GQSPQLLIYLGSNRASGVPDRFSGSGSGTDFKLQISRVEAEDVGI |
| | | YYCMQGRQFPYSFGQGTKVEIK |
| 139102-nt | 359 | CAAGTCCAACTGGTCCAGAGCGGTGCAGAAGTGAAGAAGCCCGGA |
| ScFv | | GCGAGCGTGAAAGTGTCCTGCAAGGCTTCCGGGTACACCTTCTCC |
| domain | | AACTACGGCATCACTTGGGTGCGCCAGGCCCCGGGACAGGGCCTG |
| | | GAATGGATGGGGTGGATTTCCGCGTACAACGGCAATACGAACTAC |
| | | GCTCAGAAGTTCCAGGGTAGAGTGACCATGACTAGGAACACCTCC |
| | | ATTTCCACCGCCTACATGGAACTGTCCTCCCTGCGGAGCGAGGAC |
| | | ACCGCCGTGTACTATTGCGCCCGGGGACCATACTACTACTACATG |
| | | GATGTCTGGGGGAAGGGGACTATGGTCACCGTGTCATCCGCCTCG |
| | | GGAGGCGGCGGATCAGGAGGACGCGCCTCTGGTGGTGGAGGATCG |
| | | GAGATCGTGATGACCCAGAGCCCTCTCTCCTTGCCCGTGACTCCT |
| | | GGGGAGCCCGCATCCATTTCATGCCGGAGCTCCCAGTCACTTCTC |
| | | TACTCCAACGGCTATAACTACGTGGATTGGTACCTCCAAAAGCCG |
| | | GGCCAGAGCCCGCAGCTGCTGATCTACCTGGGCTCGAACAGGGCC |
| | | AGCGGAGTGCCTGACCGGTTCTCCGGGTCGGGAAGCGGGACCGAC |
| | | TTCAAGCTGCAAATCTCGAGAGTGGAGGCCGAGGACGTGGGAATC |
| | | TACTACTGTATGCAGGGCCGCCAGTTTCCGTACTCGTTCGGACAG |
| | | GGCACCAAAGTGGAAATCAAG |
| 139102-aa | 374 | QVQLVQSGAEVKKPGASVKVSCKASGYTFSNYGITWVRQAPGQGL |
| VH | | EWMGWISAYNGNTNYAQKFQGRVTMTRNTSISTAYMELSSLRSED |
| | | TAVYYCARGPYYYYMDVWGKGTMVTVSS |
| 139102-aa | 389 | EIVMTQSPLSLPVTPGEPASISCRSSQSLLYSNGYNYVDWYLQKP |
| VL | | GQSPQLLIYLGSNRASGVPDRFSGSGSGTDFKLQISRVEAEDVGI |
| | | YYCMQGRQFPYSFGQGTKVEIK |

139104

| | | |
|---|---|---|
| 139104-aa | 345 | EVQLLETGGGLVQPGGSLRLSCAVSGFALSNHGMSWVRRAPGKGL |
| ScFv | | EWVSGIVYSGSTYYAASVKGRFTISRDNSRNTLYLQMNSLRPEDT |
| domain | | AIYYCSAHGGESDVWGQGTTVTVSSASGGGGSGGRASGGGGSEIV |
| | | LTQSPATLSVSPGESATLSCRASQSVSSNLAWYQQKPGQAPRLLI |
| | | YGASTRASGIPDRFSGSGSGTDFTLTISSLQAEDVAVYYCQQYGS |
| | | SLTFGGGTKVEIK |
| 139104-nt | 360 | GAAGTGCAATTGCTCGAAACTGGAGGAGGTCTGGTGCAACCTGGA |
| ScFv | | GGATCACTTCGCCTGTCCTGCGCCGTGTCGGGCTTTGCCCTGTCC |
| domain | | AACCATGGAATGAGCTGGGTCCGCCGCGCGCCGGGGAAGGGCCTC |
| | | GAATGGGTGTCCGGCATCGTCTACTCCGGCTCCACCTACTACGCC |
| | | GCGTCCGTGAAGGGCCGGTTCACGATTTCACGGGACAACTCGCGG |
| | | AACACCCTGTACCTCCAAATGAATTCCCTTCGGCCGGAGGATACT |
| | | GCCATCTACTACTGCTCCGCCCACGGTGGCGAATCCGACGTCTGG |
| | | GGCCAGGGAACCACCGTGACCGTGTCCAGCGCGTCCGGGGGAGGA |
| | | GGAAGCGGGGGTAGAGCATCGGGTGGAGGCGGATCAGAGATCGTG |
| | | CTGACCCAGTCCCCCGCCACCTTGAGCGTGTCACCAGGAGAGTCC |
| | | GCCACCCTGTCATGCCGCGCCAGCCAGTCCGTGTCCTCCAACCTG |
| | | GCTTGGTACCAGCAGAAGCCGGGGCAGGCCCCTAGACTCCTGATC |
| | | TATGGGGCGTCGACCCGGGCATCTGGAATTCCCGATAGGTTCAGC |
| | | GGATCGGGCTCGGGCACTGACTTCACTCTGACCATCTCCTCGCTG |
| | | CAAGCCGAGGACGTGGCTGTGTACTACTGTCAGCAGTACGGAAGC |
| | | TCCCTGACTTTCGGTGGCGGGACCAAAGTCGAGATTAAG |
| 139104-aa | 375 | EVQLLETGGGLVQPGGSLRLSCAVSGFALSNHGMSWVRRAPGKGL |
| VH | | EWVSGIVYSGSTYYAASVKGRFTISRDNSRNTLYLQMNSLRPEDT |
| | | AIYYCSAHGGESDVWGQGTTVTVSS |
| 139104-aa | 390 | EIVLTQSPATLSVSPGESATLSCRASQSVSSNLAWYQQKPGQAPR |
| VL | | LLIYGASTRASGIPDRFSGSGSGTDFTLTISSLQAEDVAVYYCQQ |
| | | YGSSLTFGGGTKVEIK |

139106

| | | |
|---|---|---|
| 139106-aa | 346 | EVQLVETGGGLVQPGGSLRLSCAVSGFALSNHGMSWVRRAPGKGL |
| ScFv | | EWVSGIVYSGSTYYAASVKGRFTISRDNSRNTLYLQMNSLRPEDT |
| domain | | AIYYCSAHGGESDVWGQGTTVTVSSASGGGGSGGRASGGGGSEIV |
| | | MTQSPATLSVSPGERATLSCRASQSVSSKLAWYQQKPGQAPRLLM |
| | | YGASIRATGIPDRFSGSGSGTEFTLTISSLEPEDFAVYYCQQYGS |
| | | SSWTFGQGTKVEIK |
| 139106-nt | 361 | GAAGTGCAATTGGTGGAAACTGGAGGAGGACTTGTGCAACCTGGA |
| ScFv | | GGATCATTGAGACTGAGCTGCGCAGTGTCGGGATTCGCCCTGAGC |
| domain | | AACCATGGAATGTCCTGGGTCAGAAGGGCCCCTGGAAAAGGCCTC |
| | | GAATGGGTGTCAGGGATCGTGTACTCCGGTTCCACTTACTACGCC |
| | | GCCTCCGTGAAGGGGCGCTTCACTATCTCACGGGATAACTCCCGC |
| | | AATACCCTGTACCTCCAAATGAACAGCCTGCGGCCGGAGGATACC |
| | | GCCATCTACTACTGTTCCGCCCACGGTGGAGAGTCTGACGTCTGG |
| | | GGCCAGGGAACTACCGTGACCGTGTCCTCCGCGTCCGGCGGTGGA |
| | | GGGAGCGGCGGCCGCGCCAGCGGCGGCGGAGGCTCCGAGATCGTG |
| | | ATGACCCAGAGCCCCGCTACTCTGTCGGTGTCGCCCGGAGAAAGG |
| | | GCGACCCTGTCCTGCCGGGCGTCGCAGTCCGTGAGCAGCAAGCTG |
| | | GCTTGGTACCAGCAGAAGCCGGGCCAGGCACCACGCCTGCTTATG |
| | | TACGGTGCCTCCATTCGGGCCACCGGAATCCCGGACCGGTTCTCG |
| | | GGGTCGGGGTCCGGTACCGAGTTCACACTGACCATTTCCTCGCTC |
| | | GAGCCCGAGGACTTTGCCGTCTATTACTGCCAGCAGTACGGCTCC |
| | | TCCTCATGGACGTTCGGCCAGGGGACCAAGGTCGAAATCAAG |
| 139106-aa | 376 | EVQLVETGGGLVQPGGSLRLSCAVSGFALSNHGMSWVRRAPGKGL |
| VH | | EWVSGIVYSGSTYYAASVKGRFTISRDNSRNTLYLQMNSLRPEDT |
| | | AIYYCSAHGGESDVWGQGTTVTVSS |
| 139106-aa | 391 | EIVMTQSPATLSVSPGERATLSCRASQSVSSKLAWYQQKPGQAPR |
| VL | | LLMYGASIRATGIPDRFSGSGSGTEFTLTISSLEPEDFAVYYCQQ |
| | | YGSSSWTFGQGTKVEIK |

139107

| | | |
|---|---|---|
| 139107-aa | 347 | EVQLVETGGGVVQPGGSLRLSCAVSGFALSNHGMSWVRRAPGKGL |
| ScFv | | EWVSGIVYSGSTYYAASVKGRFTISRDNSRNTLYLQMNSLRPEDT |
| domain | | AIYYCSAHGGESDVWGQGTTVTVSSASGGGGSGGRASGGGGSEIV |
| | | LTQSPGTLSLSPGERATLSCRASQSVGSTNLAWYQQKPGQAPRLL |
| | | IYDASNRATGIPDRFSGGGSGTDFTLTISRLEPEDFAVYYCQQYG |
| | | SSPPWTFGQGTKVEIK |
| 139107-nt | 362 | GAAGTGCAATTGGTGGAGACTGGAGGAGGAGTGGTGCAACCTGGA |
| ScFv | | GGAAGCCTGAGACTGTCATGCGCGGTGTCGGGCTTCGCCCTCTCC |
| domain | | AACCACGGAATGTCCTGGGTCCGCCGGGCCCCTGGGAAAGGACTT |
| | | GAATGGGTGTCCGGCATCGTGTACTCGGGTTCCACCTACTACGCG |
| | | GCGTCAGTGAAGGGCCGGTTTACTATTAGCCGCGACAACTCCAGA |
| | | AACACACTGTACCTCCAAATGAACTCGCTGCGGCCGGAAGATACC |
| | | GCTATCTACTACTGCTCCGCCCATGGGGGAGAGTCGGACGTCTGG |
| | | GGACAGGGCACCACTGTCACTGTGTCCAGCGCTTCCGGCGGTGGT |
| | | GGAAGCGGGGGACGGGCCTCAGGAGGCGGTGGCAGCGAGATTGTG |
| | | CTGACCCAGTCCCCCGGGACCCTGAGCCTGTCCCCGGGAGAAAGG |
| | | GCCACCCTCTCCTGTCGGGCATCCCAGTCCGTGGGGTCTACTAAC |
| | | CTTGCATGGTACCAGCAGAAGCCCGGCCAGGCCCCTCGCCTGCTG |
| | | ATCTACGACGCGTCCAATAGAGCCACCGGCATCCCGGATCGCTTC |
| | | AGCGGAGGCGGATCGGGCACCGACTTCACCCTCACCATTTCAAGG |
| | | CTGGAACCGGAGGACTTCGCCGTGTACTACTGCCAGCAGTATGGT |
| | | TCGTCCCCACCCTGGACGTTCGGCCAGGGGACTAAGGTCGAGATC |
| | | AAG |
| 139107-aa | 377 | EVQLVETGGGVVQPGGSLRLSCAVSGFALSNHGMSWVRRAPGKGL |
| VH | | EWVSGIVYSGSTYYAASVKGRFTISRDNSRNTLYLQMNSLRPEDT |
| | | AIYYCSAKGGESDVWGQGTTVTVSS |
| 139107-aa | 392 | EIVLTQSPGTLSLSPGERATLSCRASQSVGSTNLAWYQQKPGQAP |
| VL | | RLLIYDASNRATGIPDRFSGGGSGTDFTLTISRLEPEDFACYYCQ |
| | | QYGSSPPWTFGQGTKVEIK |

139108

| | | |
|---|---|---|
| 139108-aa | 348 | QVQLVESGGGLVKPGGSLRLSCAASGFTFSDYYMSWIRQAPGKGL |
| ScFv | | EWVSYISSSGSTIYYADSVKGRFTISRDNAKNSLYLQMNSLRAED |
| domain | | TAVYYCARESGDGMDVWGQGTTVTVSSASGGGGSGGRASGGGGSD |
| | | IQMTQSPSSLSASVGDRVTITCRASQSISSYLNWYQQKPGKAPKL |
| | | LIYAASSLQSGVPSRFSGSGSGTDFTLTISSLQPEDFATYYCQQS |
| | | YTLAFGQGTKVDIK |
| 139108-nt | 363 | CAAGTGCAACTCGTGGAATCTGGTGGAGGACTCGTGAAACCTGGA |
| ScFv | | GGATCATTGAGACTGTCATGCGCGGCCTCGGGATTCACGTTCTCC |
| domain | | GATTACTACATGAGCTGGATTCGCCAGGCTCCGGGGAAGGGACTG |
| | | GAATGGGTGTCCTACATTTCCTCATCCGGCTCCACCATCTACTAC |
| | | GCGGACTCCGTGAAGGGGAGATTCACCATTAGCCGCGATAACGCC |
| | | AAGAACAGCCTGTACCTTCAGATGAACTCCCTGCGGGCTGAAGAT |
| | | ACTGCCGTCTACTACTGCGCAAGGGAGAGCGGAGATGGGATGGAC |
| | | GTCTGGGGACAGGGTACCACTGTGACCGTGTCGTCGGCCTCCGGC |
| | | GGAGGGGGTTCGGGTGGAAGGGCCAGCGGCGGCGGAGGCAGCGAC |
| | | ATCCAGATGACCCAGTCCCCCTCATCGCTGTCCGCCTCCGTGGGC |
| | | GACCGCGTCACCATCACATGCCGGGCCTCACAGTCGATCTCCTCC |
| | | TACCTCAATTGGTATCAGCAGAAGCCCGGAAAGGCCCCTAAGCTT |
| | | CTGATCTACGCAGCGTCCTCCCTGCAATCCGGGGTCCCATCTCGG |
| | | TTCTCCGGCTCGGGCAGCGGTACCGACTTCACTCTGACCATCTCG |
| | | AGCCTGCAGCCGGAGGACTTCGCCACTTACTACTGTCAGCAAAGC |
| | | TACACCCTCGCGTTTGGCCAGGGCACCAAAGTGGACATCAAG |
| 139108-aa | 378 | QVQLVESGGGLVKPGGSLRLSCAASGFTFSDYYMSWIRQAPGKGL |
| VL | | EWVSYISSSGSTIYYADSVKGRFTISRDNAKNSLYLQMNSLRAED |
| | | TAVYYCARESGDGMDVWGQGTTVTVSS |
| 139108-aa | 393 | DIQMTQSPSSLSASVGDRVTITCRASQSISSYLNWYQQKPGKAPK |
| VL | | LLIYAASSLQSGVPSRFSGSGSGTDFTLTISSLQPEDFATYYCQQ |
| | | SYTLAFGQGTKVDIK |

139110

| | | |
|---|---|---|
| 139110-aa | 350 | QVQLVQSGGGLVKPGGSLRLSCAASGFTFSDYYMSWIRQAPGKGL |
| ScFv | | EWVSYISSSGNTIYYADSVKGRFTISRDNAKNSLYLQMNSLRAED |
| domain | | TAVYYCARSTMVREDYWGQGTLVTVSSASGGGGSGGRASGGGGSD |
| | | IVLTQSPLSLPVTLGQPASISCKSSESLVHNSGKTYLNWFHQRPG |
| | | QSPRRLIYEVSNRDSGVPDRFTGSGSGTDFTLKISRVEAEDVGVY |
| | | YCMQGTHWPGTFGQGTKLEIK |
| 139110-nt | 365 | CAAGTGCAACTGGTGCAAAGCGGAGGAGGATTGGTCAAACCCGGA |
| ScFv | | GGAAGCCTGAGACTGTCATGCGCGGCCTCTGGATTCACCTTCTCC |
| domain | | GATTACTACATGTCATGGATCAGACAGGCCCCGGGGAAGGGCCTC |
| | | GAATGGGTGTCCTACATCTCGTCCTCCGGGAACACCATCTACTAC |
| | | GCCGACAGCGTGAAGGGCCGCTTTACCATTTCCCGCGACAACGCA |
| | | AAGAACTCGCTGTACCTTCAGATGAATTCCCTGCGGGCTGAAGAT |
| | | ACCGCGGTGTACTATTGCGCCCGGTCCACTATGGTCCGGGAGGAC |
| | | TACTGGGGACAGGGCACACTCGTGACCGTGTCCAGCGCGAGCGGG |
| | | GGTGGAGGCAGCGGTGGACGCGCCTCCGGCGGCGGCGGTTCAGAC |
| | | ATCGTGCTGACTCAGTCGCCCCTGTCGCTGCCGGTCACCCTGGGC |
| | | CAACCGGCCTCAATTAGCTGCAAGTCCTCGGAGAGCCTGGTGCAC |
| | | AACTCAGGAAAGACTTACCTGAACTGGTTCCATCAGCGGCCTGGA |
| | | CAGTCCCCACGGAGGCTCATCTATGAAGTGTCCAACAGGGATTCG |
| | | GGGGTGCCCGACCGCTTCACTGGCTCCGGGTCCGGCACCGACTTC |
| | | ACCTTGAAAATCTCCAGAGTGGAAGCCGAGGACGTGGGCGTGTAC |
| | | TACTGTATGCAGGGTACCCACTGGCCTGGAACCTTTGGACAAGGA |
| | | ACTAAGCTCGAGATTAAG |
| 139110-aa | 380 | QVQLVQSGGGLVKPGGSLRLSCAASGFTFSDYYMSWIRQAPGKGL |
| VH | | EWVSYISSSGNTIYYADSVKGRFTISRDNAKNSLYLQMNSLRAED |
| | | TAVYYCARSTMVREDYWGQGTLVTVSS |
| 139110-aa | 395 | DIVLTQSPLSLPVTLGQPASISCKSSELSVHNSGKTYLNWFHQRP |
| VL | | GQSPRRLIYEVSNRDSGVPDRFTGSGSGTDFTLKISRVEAEDVGV |
| | | YYCMQGTHWPGTFGQGTKLEIK |

139112

| | | |
|---|---|---|
| 139112-aa | 351 | QVQLVESGGGLVQPGGSLRLSCAVSGFALSNHGMSWVRRAPGKGL |
| ScFv | | EWVSGIVYSGSTYYAASVKGRFTISRDKSRNTLYLQMNSLRPEDT |
| domain | | AIYYCSAHGGESDVWGQGTTVTVSSASGGGGSGGRASGGGGSDIR |
| | | LTQSPSPLSASVGDRVTITCQASEDINKFLNWYHQTPGKAPKLLI |
| | | YDASTLQTGVPSRFSGSGSGTDFTLTINSLQPEDIGTYYCQQYES |
| | | LPLTFGGGTKVEIK |
| 139112-nt | 366 | CAAGTGCAACTCGTGGAATCTGGTGGAGGACTCGTGCAACCCGGT |
| ScFv | | GGAAGCCTTAGGCTGTCGTGCGCCGTCAGCGGGTTTGCTCTGAGC |
| domain | | AACCATGGAATGTCCTGGGTCCGCCGGGCACCGGGAAAAGGGCTG |
| | | GAATGGGTGTCCGGCATCGTGTACAGCGGGTCAACCTATTACGCC |
| | | GCGTCCGTGAAGGGCAGATTCACTATCTCAAGAGACAACAGCCGG |
| | | AACACCCTGTACTTGCAAATGAATTCCCTGCGCCCCGAGGACACC |
| | | GCCATCTACTACTGCTCCGCCCACGGAGGAGAGTCGGACGTGTGG |
| | | GGCCAGGGAACGACTGTGACTGTGTCCAGCGCATCAGGAGGGGGT |
| | | GGTTCGGGCGGCCGGGCCTCGGGGGGAGGAGGTTCCGACATTCGG |
| | | CTGACCCAGTCCCCGTCCCCACTGTCGGCCTCCGTCGGCGACCGC |
| | | GTGACCATCACTTGTCAGGCGTCCGAGGACATTAACAAGTTCCTG |
| | | AACTGGTACCACCAGACCCCTGGAAAGGCCCCCAAGCTGCTGATC |
| | | TACGATGCCTCGACCCTTCAAACTGGAGTGCCTAGCCGGTTCTCC |
| | | GGGTCCGGCTCCGGCACTGATTTCACTCTGACCATCAACTCATTG |
| | | CAGCCGGAAGATATCGGGACCTACTATTGCCAGCAGTACGAATCC |
| | | CTCCCGCTCACATTCGGCGGGGGAACCAAGGTCGAGATTAAG |
| 139112-aa | 381 | QVQLVESGGGLVQPGGSLRLSCAVSGFALSNHGMSWVRRAPGKGL |
| VH | | EWVSGIVYSGSTYYAASVKGRFTISRDNSRNTLYLQMNSLRPEDT |
| | | AIYYCSAHGGE3DVWGQGTTVTVSS |
| 139112-aa | 396 | DIRLTQSPSPLSASVGDRVTITCQASEDINKFLNWYHQTPGKAPK |
| VL | | LLIYDASTLQTGVPSRFSGSGSGTDFTLTINSLQPEDIGTYYCQQ |
| | | YESLPLTFGGGTKVEIK |

139113

| | | |
|---|---|---|
| 139113-aa | 352 | EVQLVETGGGLVQPGGSLRLSCAVSGFALSNHGMSWVRRAPGKGL |
| ScFv | | EWVSGIVYSGSTYYAASVKGRFTI3RDKSRNTLYLQMNSLRPEDT |
| domain | | AIYYCSAHGGE3DVWGQGTTVTVSSASGGGGSGGRASGGGGSETT |
| | | LTQSPATLSVSPGERATLSCRASQSVGSNLAWYQQKPGQGPRLLI |
| | | YGASTRATGIPARFSGSGSGTEFTLTISSLQPEDFAVYYCQQYND |
| | | WLPVTFGQGTKVEIK |
| 139113-nt | 367 | GAAGTGCAATTGGTGGAAACTGGAGGAGGACTTGTGCAACCTGGA |
| ScFv | | GGATCATTGCGGCTCTCATGCGCTGTCTCCGGCTTCGCCCTGTCA |
| domain | | AATCACGGGATGTCGTGGGTCAGACGGGCCCCGGGAAAGGGTCTG |
| | | GAATGGGTGTCGGGGATTGTGTACAGCGGCTCCACCTACTACGCC |
| | | GCTTCGGTCAAGGGCCGCTTCACTATTTCACGGGACAACAGCCGC |
| | | AACACCCTCTATCTGCAAATGAACTCTCTCCGCCCGGAGGATACC |
| | | GCCATCTACTACTGCTCCGCACACGGCGGCGAATCCGACGTGTGG |
| | | GGACAGGGAACCACTGTCACCGTGTCGTCCGCATCCGGTGGCGGA |
| | | GGATCGGGTGGCCGGGCCTCCGGGGGCGGCGGCAGCGAGACTACC |
| | | CTGACCCAGTCCCCTGCCACTCTGTCCGTGAGCCCGGGAGAGAGA |
| | | GCCACCCTTAGCTGCCGGGCCAGCCAGAGCGTGGGCTCCAACCTG |
| | | GCCTGGTACCAGCAGAAGCCAGGACAGGGTCCCAGGCTGCTGATC |
| | | TACGGAGCCTCCACTCGCGCGACCGGCATCCCCGCGAGGTTCTCC |
| | | GGGTCGGGTTCCGGGACCGAGTTCACCCTGACCATCTCCTCCCTC |
| | | CAACCGGAGGACTTCGCGGTGTACTACTGTCAGCAGTACAACGAT |
| | | TGGCTGCCCGTGACATTTGGACAGGGGACGAAGGTGGAAATCAAA |
| 139113-aa | 382 | EVQLVETGGGLVQPGGSLRLSCAVSGFALSNHGMSWVRRAPGKGL |
| VH | | EWVSGIVYSGSTYYAASVKGRFTISRDKSRNTLYLQMNSLRPEDT |
| | | AIYYCSAKGGESDVWGQGTTVTVSS |
| 139113-aa | 397 | ETTLTQSPATLSVSPGERATLSCRASQSVGSNLAWYQQKPGQGPR |
| VL | | LLIYGASTRATGIPARFSGSGSGTEFTLTISSLQPEDFAVYYCQQ |
| | | YNDWLPVTFGQGTKVEIK |

139114

| | | |
|---|---|---|
| 139114-aa | 353 | EVQLVESGGGLVQPGGSLRLSCAVSGFALSNHGMSWVRRAPGKGL |
| ScFv | | EWVSGIVYSGSTYYAASVKGRFTISRDNSRNTLYLQMNSLRPEDT |
| domain | | AIYYCSAHGGESDVWGQGTTVTVSSASGGGGSGGRASGGGGSEIV |
| | | LTQSPGTLSLSPGERATLSCRASQSIGSSSLAWYQQKPGQAPRLL |
| | | MYGASSRASGIFDRFSGSGSGTDFTLTISRLEPEDFAVYYCQQYA |
| | | GSPPFTFGQGTKVEIK |
| 139114-nt | 368 | GAAGTGCAATTGGTGGAATCTGGTGGAGGACTTGTGCAACCTGGA |
| ScFv | | GGATCACTGAGACTGTCATGCGCGGTGTCCGGTTTTGCCCTGAGC |
| domain | | AATCATGGGATGTCGTGGGTCCGGCGCGCCCCCGGAAAGGGTCTG |
| | | GAATGGGTGTCGGGTATCGTCTACTCCGGGAGCACTTACTACGCC |
| | | GCGAGCGTGAAGGGCCGCTTCACCATTTCCCGCGATAACTCCCGC |
| | | AACACCCTGTACTTGCAAATGAACTCGCTCCGGCCTGAGGACACT |
| | | GCCATCTACTACTGCTCCGCACACGGAGGAGAATCCGACGTGTGG |
| | | GGCCAGGGAACTACCGTGACCGTCAGCAGCGCCTCCGGCGGCGGG |
| | | GGCTCAGGCGGACGGGCTAGCGGCGGCGGTGGCTCCGAGATCGTG |
| | | CTGACCCAGTCGCCTGGCACTCTCTCGCTGAGCCCCGGGGAAAGG |
| | | GCAACCCTGTCCTGTCGGGCCAGCCAGTCCATTGGATCATCCTCC |
| | | CTCGCCTGGTATCAGCAGAAACCGGGACAGGCTCCGCGGCTGCTT |
| | | ATGTATGGGGCCAGCTCAAGAGCCTCCGGCATTCCCGACCGGTTC |
| | | TCCGGGTCCGGTTCCGGCACCGATTTCACCCTGACTATCTCGAGG |
| | | CTGGAGCCAGAGGACTTCGCCGTGTACTACTGCCAGCAGTACGCG |
| | | GGGTCCCCGCCGTTCACGTTCGGACAGGGAACCAAGGTCGAGATC |
| | | AAG |
| 139114-aa | 383 | EVQLVESGGGLVQPGGSLRLSCAVSGFALSNHGMSWVRRAPGKGL |
| VH | | EWVSGIVYSGSTYYAASVKGRFTISRDNSRNTLYLQMNSLRPEDT |
| | | ATYYCSAHGGESDVWGQGTTVTVSS |
| 139114-aa | 398 | EIVLTQSPGTLSLSPGERATLSCRASQSIGSSSLAWYQQKPGQAP |
| VL | | RLLMYGASSRASGIPDRFSGSGSGTDFTLTISRLEPEDFAVYYCQ |
| | | QYAGSPPFTFGQGTKVEIK |

149362

| | | |
|---|---|---|
| 149362-aa | 429 | QVQLQESGPGLVKPSETLSLTCTVSGGSISSSYYYWGWIRQPPGK |
| ScFv | | GLEWIGSIYYSGSAYYNPSLKSRVTISVDTSKNQFSLRLSSVTAA |
| domain | | DTAVYYCARHWQEWPDAFDIWGQGTMVTVSSGGGGSGGGGSGGGG |
| | | SETTLTQSPAFMSATPGDKVIISCKASQDIDDAMNWYQQKPGEAP |
| | | LFIIQSATSPVPGIPPRFSGSGFGTDFSLTINNIESEDAAYYFCL |
| | | QHDNFPLTFGQGTKLEIK |
| 149362-nt | 450 | CAAGTGCAGCTTCAGGAAAGCGGACCGGGCCTGGTCAAGCCATCC |
| ScFv | | GAAACTCTCTCCCTGACTTGCACTGTGTCTGGCGGTTCCATCTCA |
| domain | | TCGTCGTACTACTACTGGGGCTGGATTAGGCAGCCGCCCGGAAAG |
| | | TACAACCCTAGCCTCAAGTCGAGAGTGACCATCTCCGTGGATACC |
| | | GGACTGGAGTGGATCGGAAGCATCTACTATTCCGGCTCGGCGTAC |
| | | TCCAAGAACCAGTTTTCCCTGCGCCTGAGCTCCGTGACCGCCGCT |
| | | GACACCGCCGTGTACTACTGTGCTCGGCATTGGCAGGAATGGCCC |
| | | GATGCCTTCGACATTTGGGGCCAGGGCACTATGGTCACTGTGTCA |
| | | TCCGGGGGTGGAGGCAGCGGGGGAGGAGGGTCCGGGGGGGGAGGT |
| | | TCAGAGACAACCTTGAGCCAGTCACCCGCATTCATGTCCGCCACT |
| | | CCGGGAGACAAGGTCATCATCTCGTGCAAAGCGTCCCAGGATATC |
| | | GACGATGCCATGAATTGGTACCAGCAGAAGCCTGGCGAAGCGCCG |
| | | CTGTTCATTATCCAATCCGCAACCTCGCCCGTGCCTGGAATCCCA |
| | | CCGCGGTTCAGCGGCAGCGGTTTCGGAACCGACTTTTCCCTGACC |
| | | ATTAACAACATTGAGTCCGAGGACGCCGCCTACTACTTCTGCCTG |
| | | CAACACGACAACTTCCCTCTCACGTTCGGCCAGGGAACCAAGCTG |
| | | GAAATCAAG |
| 149362-aa | 471 | QVQLQESGPGLVKPSETLSLTCTVSGGSISSSYYYWGWIRQPPGK |
| VH | | GLEWIGSIYYSGSAYYNPSLKSRVTISVDTSKNQFSLRLSSVTAA |
| | | DTAVYYCARHWQEWPDAFDIWGQGTMVTVSS |
| 149362-aa | 492 | ETTLTQSPAFMSATPGDKVIISCKASQDIDDAMNWYQQKPGEAPL |
| VL | | FIIQSATSPVPGIPPRFSGSGFGTDFSLTINNIESEDAAYYFCLQ |
| | | HDNFPLTFGQGTKLEIK |

149363

| | | |
|---|---|---|
| 149363-aa | 430 | QVNLRESGPALVKPTQTLTLTCTFSGFSLRTSGMCVSWIRQPPGK |
| ScFv | | ALEWLARIDWDEDKFYSTSLKTRLTISKDTSDNQVVLRMTNMDPA |
| domain | | DTATYYCARSGAGGTSATAFDIWGPGTMVTVSSGGGGSGGGGSGG |
| | | GGSDIQMTQSPSSLSASVGDRVTITCRASQDIYNNLAWFQLKPGS |
| | | APRSLMYAANKSQSGVPSRFSGSASGTDFTLTISSLQPEDFATYY |
| | | CQHYYRFPYSFGQGTKLEIK |
| 149363-nt | 451 | CAAGTCAATCTGCGCGAATCCGGCCCCGCCTTGGTCAAGCCTACC |
| ScFv | | CAGACCCTCACTCTGACCTGTACTTTCTCCGGCTTCTCCCTGCGG |
| domain | | ACTTCCGGGATGTGCGTGTCCTGGATCAGACAGCCTCCGGGAAAG |
| | | GCCCTGGAGTGGCTCGCTCGCATTGACTGGGATGAGGACAAGTTC |
| | | TACTCCACCTCACTCAAGACCAGGCTGACCATCAGCAAAGATACC |
| | | TCTGACAACCAAGTGGTGCTCCGCATGACCAACATGGACCCAGCC |
| | | GACACTGCCACTTACTACTGCGCGAGGAGCGGAGCGGGCGGAACC |
| | | TCCGCCACCGCCTTCGATATTTGGGGCCCGGGTACCATGGTCACC |
| | | GTGTCAAGCGGAGGAGGGGGGTCCGGGGGCGGCGGTTCCGGGGGA |
| | | GGCGGATCGGACATTCAGATGACTCAGTCACCATCGTCCCTGAG |
| | | GCTAGCGTGGGCGACAGAGTGACAATCACTTGCCGGGCATCCCAG |
| | | GACATCTATAACAACCTTGCGTGGTTCCAGCTGAAGCCTGGTTCC |
| | | GCACCGCGGTCACTTATGTACGCCGCCAACAAGAGCCAGTCGGGA |
| | | GTGCCGTCCCGGTTTTCCGGTTCGGCCTCGGGAACTGACTTCACC |
| | | CTGACGATCTCCAGCCTGCAACCCGAGGATTTCGCCACCTACTAG |
| | | TGCCAGCACTACTAGCGCTTTCCCTACTCGTTCGGACAGGGAACC |
| | | AAGCTGGAAATCAAG |
| 149363-aa | 472 | QVNLRESGPALVKPTQTLTLTCTFSGFSLRTSGMCVSWIRQPPGK |
| VH | | ALEWLARIDWDEDKFYSTSLKTRLTISKDTSDNQVVLRMTNMDPA |
| | | DTATYYCARSGAGGTSATAFPIWGPGTMVTVSS |
| 149363-aa | 493 | DIQMTQSPSSLSASVGDRVTITCRASQDIYNNLAWFQLKPGSAPR |
| VL | | SLMYAANKSQSGVPSRFSGSASGTDFTLTISSLQPEDFATYYCQH |
| | | YYRFPYSFGQGTKLEIK |

149364

| | | |
|---|---|---|
| 149364-aa | 431 | EVQLVESGGGLVKPGGSLRLSCAASGFTFSSYSMNWVRQAPGKGL |
| ScFv | | EWVSSISSSSSYIYYADSVKGRFTISRDNAKNSLYLQMNSLRAED |
| domain | | TAVYYCAKTIAAVYAFDIWGQGTTVTVSSGGGGSGGGGSGGGGSE |
| | | IVLTQSPLSLPVTPEEPASISCRSSQSLLHSNGYNYLDWYLQKPG |
| | | QSPQLLIYLGSNRASGVPDRFSGSGSGTDFTLKISRVEAEDVGVY |
| | | YCMQALOTPYTFGQGTKLEIK |
| 149364-nt | 452 | GAAGTGCAGCTTGTCGAATCCGGGGGGGGACTGGTCAAGCCGGGC |
| ScFv | | GGATCACTGAGACTGTCCTGCGCCGCGAGCGGCTTCACGTTCTCC |
| domain | | TCCTACTCCATGAACTGGGTCCGCCAAGCCCCCGGGAAGGGACTG |
| | | GAATGGGTGTCCTCTATCTCCTCGTCGTCGTCCTACATCTACTAC |
| | | GCCGACTCCGTGAAGGGAAGATTCACCATTTCCCGCGACAACGCA |
| | | AAGAACTCACTGTACTTGCAAATGAACTCACTCCGGGCCGAAGAT |
| | | ACTGCTGTGTACTATTGCGCCAAGACTATTGCCGCCGTCTACGCT |
| | | TTCGACATCTGGGGCCAGGGAACCACCGTGACTGTGTCGTCCGGT |
| | | GGTGGTGGCTCGGGCGGAGGAGGAAGCGGCGGCGGGGGGTCCGAG |
| | | ATTGTGCTGACCCAGTCGCCACTGAGCCTCCCTGTGACCCCCGAG |
| | | GAACCCGCCAGCATCAGCTGCCGGTCCAGCCAGTCCCTGCTCCAC |
| | | TCCAACGGATACAATTACCTCGATTGGTACCTTCAGAAGCCTGGA |
| | | CAAAGCCCGCAGCTGCTCATCTACTTGGGATCAAACCGCGCGTCA |
| | | GGAGTGCCTGACCGGTTCTCCGGCTCGGGCAGCGGTACCGATTTC |
| | | ACCCTGAAAATCTCCAGGGTGGAGGCAGAGGACGTGGGAGTGTAT |
| | | TACTGTATGCAGGCGCTGCAGACTCCGTACACATTTGGGCAGGGC |
| | | ACCAAGCTGGAGATCAAG |
| 149364-aa | 473 | EVQLVESGGGLVKPGGSLRLSCAASGFTFSSYSMNWVRQAPGKGL |
| VH | | SWVSSISSSSSYIYYADSVKGRFTISRDNAKNSLYLQMNSLRAED |
| | | TAVYYCAKTIAAVYAFDIWGQGTTVTVSS |
| 149364-aa | 494 | EIVLTQSPLSLPVTPEEPASISCRSSQSLLHSNGYNYLDWYLQKP |
| VL | | GQSPQLLIYLGSNRASGVPDRFSGSGSGTDFTLKISRVEAEDVGV |
| | | YYCMQALQTPYTFGQGTKLEIK |

149365

| | | |
|---|---|---|
| 149365-aa | 432 | EVQLVESGGGLVKPGGSLRLSCAASGFTFSDYYMSWIRQAPGKGL |
| ScFv | | EWVSYISSSGSTIYYADSVKGRFTISRDNAKNSLYLQMNSLRAED |
| domain | | TAVYYCARDLRGAFDIWGQGTMVTVSSGGGGSGGGGSGGGGSSYV |
| | | LTQSPSVSAAPGYTATISCGGNNIGTKSVHWYQQKPGQAPLLVIR |
| | | DDSVRPSKIPGRFSGSNSGNMATLTISGVQAGDEADFYCQVWDSD |
| | | SEHVVFGGGTKLTVL |
| 149365-nt | 453 | GAAGTCCAGCTCGTGGAGTCCGGCGGAGGCCTYGTGAAGCCTGGA |
| ScFv | | GGTTCGCTGAGACTGTCCTGCGCCGCCTCCGGCTTCACCTTCTCC |
| domain | | GACTACTACATGTCCTGGATCAGACAGGCCCCGGGAAAGGGCCTG |
| | | GAATGGGTGTCCTACATCTCGTCATCGGGCAGCACTATCTACTAC |
| | | GCGGACTCAGTGAAGGGGCGGTTCACCATTTCCCGGGATAACGCG |
| | | AAGAACTCGCTGTATCTGCAAATGAACTCACTGAGGGCCGAGGAC |
| | | ACCGCCGTGTACTACTGCGCCCGCGATCTCCGCGGGGCATTTGAC |
| | | ATCTGGGGACAGGGAACCATGGTCACAGTGTCCAGCGGAGGGGGA |
| | | GGATCGGGTGGCGGAGGTTCCGGGGGTGGAGGCTCCTCCTACGTG |
| | | CTGACTCAGAGCCCAAGCGTCAGCGCTGCGCCCGGTTACACGGCA |
| | | ACCATCTCCTGTGGCGGAAACAACATTGGGACCAAGTCTGTGCAC |
| | | TGGTATCAGCAGAAGCCGGGCCAAGCTCCCCTGTTGGTGATCCGC |
| | | GATGACTCCGTGCGGCCTAGCAAAATTCCGGGACGGTTCTCCGGC |
| | | TCCAACAGCGGCAATATGGCCACTCTCACCATCTCGGGAGTGCAG |
| | | GCCGGAGATGAAGCCGACTTCTACTGCCAAGTCTGGGACTCAGAC |
| | | TCCGAGCATGTGGTGTTCGGGGGCGGAACCAAGCTGACTGTGCTC |
| 149365-aa | 474 | EVQLVESGGGLVKPGGSLRLSCAASGFTFSDYYMSWIRQAPGKGL |
| VH | | EWVSYISSSGSTIYYADSVKGRFTISRDMAKNSLYLQMNSLRAED |
| | | TAVYYCARDLRGAFDIWGQGTMVTVSS |
| 149365-aa | 495 | SYVLTQSPSVSAAPGYTATISCGGNNIGTKSVHWYQQKPGQAPLL |
| VL | | VIRDDSVRPSKIPGRFSGSNSGNMATLTISGVQAGDEADFYCQVW |
| | | DSDSEHVVFGGGTKLTVL |

149366

| | | |
|---|---|---|
| 149366-aa | 433 | QVQLVQSGAEVKKPGASVKVSCKPSGYTVTSHYIHWVRRAPGQGL |
| ScFv | | EWMGMINPSGGVTAYSQTLQGRVTMTSDTSSSTVYMELSSLRSED |
| domain | | TAMYYCAREGSGSGWYFDFWGRGTLVTVSSGGGGSGGGGSGGGGS |
| | | SYVLTQPPSVSVSPGQTASITCSGDGLSKKYVSWYQQKAGQSPVV |
| | | LISRDKERPSGIPDRFSGSNSADTATLTISGTQAMDEADYYCQAW |
| | | DDTTVVFGGGTKLTVL |
| 149366-nt | 454 | CAAGTGCAGCTGGTGCAGAGCGGGGCCGAAGTCAAGAAGCCGGGA |
| ScFv | | GCCTCCGTGAAAGTGTCCTGCAAGCCTTCGGGATACACCGTGACC |
| domain | | TCCCACTACATTCATTGGGTCCGCCGCGCCCCCGGCCAAGGACTC |
| | | GAGTGGATGGGCATGATCAACCCTAGCGGCGGAGTGACCGCGTAC |
| | | AGCCAGACGCTGCAGGGACGCGTGACTATGACCTCGGATACCTCC |
| | | TCCTCCACCGTCTATATGGAACTGTCCAGCCTGCGGTCCGAGGAT |
| | | ACCGCCATGTACTACTGCGCCCGGGAAGGATCAGGCTCCGGGTGG |
| | | TATTTCGACTTCTGGGGAAGAGGCACCCTCGTGACTGTGTCATCT |
| | | GGGGGAGGGGGTTCCGGTGGTGGCGGATCGGGAGGAGGCGGTTCA |
| | | TCCTACGTGCTGACCCAGCCACCCTCCGTGTCCGTGAGCCCCGGC |
| | | CAGACTGCATCGATTACATGTAGCGGCGACGGCCTCTCCAAGAAA |
| | | TACGTGTCGTGGTACCAGCAGAAGGCCGGACAGAGCCCGGTGGTG |
| | | CTGATCTCAAGAGATAAGGAGCGGCCTAGCGGAATCCCGGACAGG |
| | | TTCTCGGGTTCCAACTCCGCGGACACTGCTACTCTGACCATCTCG |
| | | GGGACCCAGGCTATGGACGAAGCCGATTACTACTGCCAAGCCTGG |
| | | GACGACACTACTGTCGTGTTTGGAGGGGGCACCAAGTTGACCGTC |
| | | CTT |
| 149366-aa | 475 | QVQLVQSGAEVKKPGASVKVSCKPSGYTVTSHYIHWVRRAPGQGL |
| VH | | EMWGMINPSGGTVAYSQTLQGRVTMTSDTSSSTVYMELSSLRSED |
| | | TAMYYCAREGSGSGWYFDFWGRGTLVTVSS |
| 149366-aa | 496 | SYVLTQPPSVSVSPGQTASITCSGDGLSKKYVSWYQQKAGQSPVV |
| VL | | LISRDKERPSGIPDRFSGSNSADTATLTISGTQAMDEADYYCQAW |
| | | DDTTVVFGGGTKLTVL |

149367

| | | |
|---|---|---|
| 149367-aa | 434 | QVQLQESGPGLVKPSQTLSLTCTVSGGSISSGGYYWSWIRQHPGK |
| ScFv | | GLEWIGYIYYSGSTYYNPSLKSRVTISVDTSKNQFSLKLSSVTAA |
| domain | | DTAVYYCARAGIAARLRGAFDIWGQGTMVTVSSGGGGSGGGGSGG |
| | | GGSDIVMTQSPSSVSASVGDRVIITCRASQGIRNWLAWYQQKPGK |
| | | APNLLIYAASNLQSGVPSRFSGSGSGADFTLTISSLQPEDVATYY |
| | | CQKYNSAPFTFGPGTKVDIK |
| 149367-nt | 455 | CAAGTGCAGCTTCAGGAGAGCGGCCCGGGACTCGTGAAGCCGTCC |
| ScFv | | CAGACCCTGTCCCTGACTTGCACCGTGTCGGGAGGAAGCATCTCG |
| domain | | AGCGGAGGCTACTATTGGTCGTGGATTCGGCAGCACCCTGGAAAG |
| | | GGCCTGGAATGGATCGGCTACATCTACTACTCCGGCTCGACCTAC |
| | | TACAACCCATCGCTGAAGTCCAGAGTGACAATCTCAGTGGACACG |
| | | TCCAAGAATCAGTTCAGCCTGAAGCTCTCTTCCGTGACTGCGGCC |
| | | GACACCGCCGTGTACTACTGCGCACGCGCTGGAATTGCCGCCCGG |
| | | CTGAGGGGTGCCTTCGACATTTGGGGACAGGGCACCATGGTCACC |
| | | GTGTCCTCCGGCGGCGGAGGTTCCGGGGGTGGAGGCTCAGGAGGA |
| | | GGGGGGTCCGACATCGTCATGACTCAGTCGCCCTCAAGCGTCAGC |
| | | GCGTCCGTCGGGGACAGAGTGATCATCACCTGTCGGGCGTCCCAG |
| | | GGAATTCGCAACTGGCTGGCCTGGTATCAGCAGAAGCCCGGAAAG |
| | | GCCCCCAACCTGTTGATCTACGCCGCCTCAAACCTCCAATCCGGG |
| | | GTGCCGAGCCGCTTCAGCGGCTCCGGTTCGGGTGCCGATTTCACT |
| | | CTGACCATCTCCTCCCTGCAACCTGAAGATGTGGCTACCTACTAC |
| | | TGCCAAAAGTACAACTCCGCACCTTTTACTTTCGGACCGGGGACC |
| | | AAAGTGGACATTAAG |
| 149367-aa | 476 | QVQLQESGPGLVKPSQTLSLTCTVSGGSISSGGYYWSWIRQHPGK |
| VH | | GLEWIGYIYYSGSTYYNPSLKSRVTISVDTSKNQFSLKLSSVTAA |
| | | DTAVYYCARAGIAARLRGAFDIWGQGTMVTVSS |
| 149367-aa | 497 | DIVMTQSPSSVSASVGDRVIITCRASQGIRNWLAWYQQKPGKAPN |
| VL | | LLIYAASNLQSGVPSRFSGSGSGADFTLTISSLQPEDVATYYCQK |
| | | YNSAPFTFGPGTKVDIK |

149368

| | | |
|---|---|---|
| 149368-aa | 435 | QVQLVQSGAEVKKPGSSVKVSCKASGGTFSSYAISWVRQAPGQGL |
| ScFv | | EWMGGIIPIFGTAKYAQKFQGRVTITADESTSTAYMELSSLRSED |
| domain | | TAVYYCARRGGYQLLRWDVGLLRSAFDIWGQGTMVTVSSGGGGSG |
| | | GGGSGGGGSSYVLTQPPSVSVAPGQTARITCGGNNIGSKSVHWYQ |
| | | QKPGQAPVLVLYGKNNRPSGVPDRFSGSRSGTTASLTITGAQAED |
| | | EADYYCSSRDSSGDHLRVFGTGTKVTVL |
| 149368-nt | 456 | CAAGTGCAGCTGGTCCAGTCGGGCGCCGAGGTCAAGAAGCCCGGG |
| ScFv | | AGCTCTGTGAAAGTGTCCTGCAAGGCCTCCGGGGGCACCTTTAGC |
| domain | | TCCTACGCCATCTCCTGGGTCCGCCAAGCACCGGGTCAAGGCCTG |
| | | GAGTGGATGGGGGGAATTATCCCTATCTTCGGCACTGCCAACTAC |
| | | GCCCAGAAGTTCCAGGGACGCGTGACCATTACCGCGGACGAATCC |
| | | ACCTCCACCGCTTATATGGAGCTGTCCAGCTTGCGCTCGGAAGAT |
| | | ACCGCCGTGTACTACTGCGCCCGGAGGGGTGGATACCAGCTGCTG |
| | | AGATGGGACGTGGGCCTCCTGCGGTCGGCGTTCGACATCTGGGGC |
| | | CAGGGCACTATGGTCACTGTGTCCAGCGGAGGAGGCGGATCGGGA |
| | | GGCGGCGGATCAGGGGGAGGCGGTTCCAGCTACGTGCTTACTCAA |
| | | CCCCCTTCGGTGTCCGTGGCCCCGGGACAGACCGCCAGAATCACT |
| | | TGCGGAGGAAACAACATTGGGTCCAAGAGCGTGCATTGGTACCAG |
| | | CAGAAGCCAGGACAGGCCCCTGTGCTGGTGCTCTACGGGAAGAAC |
| | | AATCGGCCCAGCGGAGTGCCGGACAGGTTCTCGGGTTCACGCTCC |
| | | GGTACAACCGCTTCACTGACTATCACCGGGGCCCAGGCAGAGGAT |
| | | GAAGCGGACTACTACTGTTCCTCCCGGGATTCATCCGGCGACCAC |
| | | CTCCGGGTGTTCGGAACCGGAACGAAGGTCACCGTGCTG |
| 149368-aa | 477 | QVQLVQSGAEVKKPGSSVKVSCKASGGTFSSYAISWVRQAPGQGL |
| VH | | EWMGGIIPIFGTANYAQKFQGRVTITADESTSTAYMELSSLRSED |
| | | TAVYYCARRGGYQLLRWDVGLLRSAFDIWGQGTMVTVSS |
| 149368-aa | 498 | SYVLTQPPSVSVAPGQTARITCGGNNIGSKSVHWYQQKPGQAPVL |
| VL | | VLYGKNNRPSGVPDRFSGSRSGTTASLTITGAQAEDEADYYCSSR |
| | | DSSGDKLRVFGTGTKVTVL |

149369

| | | |
|---|---|---|
| 149369-aa | 436 | EVQLQQSGPGLVKPSQTLSLTCAISGDSVSSNSAAWNWIRQSPSR |
| ScFv | | GLEWLGRTYYRSKWYSFYAISLKSRIIINPDTSKKQFSLQLKSVT |
| domain | | PEDTAVYYCARSSPEGLFLYWFDPWGQGTLVTVSSGGDGSGGGGS |
| | | GGGGSSSELTQDPAVSVALGQTIRITCQGDSLGNYYATWYQQKPG |
| | | QAPVLVIYGTNNRPSGIPDRFSASSSGNTASLTITGAQAEDEADY |
| | | YCNSRDSSGHHLLFGTGTKVTVL |
| 149369-nt | 457 | GAAGTGCAGCTCCAACAGTCAGGACCGGGGCTCGTGAAGCCATCC |
| ScFv | | CAGACCCTGTCCCTGACTTGTGCCATCTCGGGAGATAGCGTGTCA |
| domain | | TCGAACTCCGCCGCCTGGAACTGGATTCGGCAGAGCCCGTCCCGC |
| | | GGACTGGAGTGGCTTGGAAGGACCTACTACCGGTCCAAGTGGTAC |
| | | TCTTTCTACGCGATCTCGCTGAAGTCCCGCATTATCATTAACCCT |
| | | GATACCTCCAAGAATCAGTTCTCCCTCCAACTGAAATCCGTCACC |
| | | CCCGAGGACACAGCAGTGTATTACTGCGCACGGAGCAGCCCCGAA |
| | | GGACTGTTCCTGTATTGGTTTGACCCCTGGGGCCAGGGGACTCTT |
| | | GTGACCGTGTCGAGCGGCGGAGATGGGTCCGGTGGCGGTGGTTCG |
| | | GGGGGCGGCGGATCATCATCCGAACTGACCCAGGACCCGGCTGTG |
| | | TCCGTGGCGCTGGGACAAACCATCCGCATTACGTGCCAGGGAGAC |
| | | TCCCTGGGCAACTACTACGCCACTTGGTACCAGCAGAAGCCGGGC |
| | | CAAGCCCCTGTGTTGGTCATCTACGGGACCAACAACAGACCTTCC |
| | | GGCATCCCCGACCGGTTCAGCGCTTCGTCCTCCGGCAACACTGCC |
| | | AGCCTGACCATCACTGGAGCGCAGGCCGAAGATGAGGCCGACTAG |
| | | TACTGCAACAGCAGAGACTCCTCGGGTCATCACCTCTTGTTCGGA |
| | | ACTGGAACCAAGGTCACCGTGCTG |
| 149369-aa | 478 | EVQLQQSGPGLVKPSQTLSLTCAISGDSVSSNSAAWNWIRQSPSR |
| VH | | GLEWLGRTYYRSKWYSFYAISLKSRIIINPDTSKNQFSLQLKSVT |
| | | PEDTAVYYCARSSPEGLFLYWFDPWGQGTLVTVSS |
| 149369-aa | 499 | SSELTQDPAVSVALGQTIRITCQGDSLGNYYATWYQQKPGQAPVL |
| VL | | VIYGTNNRPSGIPDRFSASSSGMTASLTITGAQAEDEADYYCNSR |
| | | DSSGHHLLFGTGTKVTVL |

BCMA_EBB-C1978-A4

| | | |
|---|---|---|
| BCMA_EBB- | 437 | EVQLVESGGGLVQPGGSLRLSCAASGFTFSSYAMSWVRQAPGKGL |
| C1978-A4-aa | | EWVSAISGSGGSTYYADSVKGRFTISRDNSKNTLYLQMNSLRAED |
| ScFv | | TAVYYCAKVEGSGSLDYWGQGTLVTVSSGGGGSGGGGSGGGGSEI |
| domain | | VMTQSPGTLSLSPGERATLSCRASQSVSSAYLAWYQQKPGQPPRL |
| | | LISGASTRATGIPDRFGGSGSGTDFTLTISRLEPEDFAVYYCQHY |
| | | GSSFNGSSLFTFGQGTRLEIK |
| BCMA_EBB- | 458 | GAAGTGCAGCTCGTGGAGTCAGGAGGCGGCCTGGTCCAGCCGGGA |
| C1978-A4-nt | | GGGTCCCTTAGACTGTCA7GCGCCGCAAGCGGATTCACTTTCTCC |
| ScFv | | TCCTATGCCATGAGCTGGGTCCGCCAAGCCCCCGGAAAGGGACTG |
| domain | | GAATGGGTGTCCGCCATCTCGGGGTCTGGAGGCTCAACTTACTAC |
| | | GCTGACTCCGTGAAGGGACGGTTCACCATTAGCCGCGACAACTCC |
| | | AAGAACACCCTCTAGCTCCAAATGAACTCCCTGCGGGCCGAGGAT |
| | | ACCGCCGTCTACTACTGCGCCAAAGTGGAAGGTTCAGGATCGCTG |
| | | GACTACTGGGGACAGGGTACTCTCGTGACCGTGTCATCGGGCGGA |
| | | GGAGGTTCCGGCGGTGGCGGCTCCGGCGGCGGAGGGTCGGAGATC |
| | | GTGATGACCCAGAGCCCTGGTACTCTGAGCCTTTCGCCGGGAGAA |
| | | AGGGCCACCCTGTCCTGCCGCGCTTCCCAATCCGTGTCCTCCGCG |
| | | TACTTGGCGTGGTACCAGCAGAAGCCGGGACAGCCCCCTCGGCTG |
| | | CTGATCAGCGGGGCCAGCACCCGGGCAACCGGAATCCCAGACAGA |
| | | TTCGGGGGTTCCGGCAGCGGCACAGATTTCACCCTGACTATTTCG |
| | | AGGTTGGAGCCCGAGGACTTTGCGGTGTATTACTGTCAGCACTAC |
| | | GGGTCGTCCTTTAATGGCTCCAGCCTGTTCACGTTCGGACAGGGG |
| | | ACCCGCCTGGAAATCAAG |
| BCMA_EBB- | 479 | EVQLVESGGGLVQPGGSLRLSCAASGFTFSSYAMSWVRQAPGKGL |
| C1978-A4-aa | | EWVSAISGSGGSTYYADSVKGRFTISRDNSKNTLYLQMNSLRAED |
| VH | | TAVYYCAKVEGSGSLDYWGQGTLVTVSS |
| BCMA_EBB- | 500 | EIVMTQSPGTLSLSPGERATLSCRASQSVSSAYLAWYQQKPGQPP |
| C1978-A4-aa | | RLLISGASTRATGIPDRFGGSGSGTDFTLTISRLEPEDFAVYYCQ |
| VL | | HYGSSFNGSSLFTFGQGTRLEIK |

BCMA_EBB-C1978-G1

| | | |
|---|---|---|
| BCMA_EBB- | 438 | EVQLVETGGGLVQPGGSLRLSCAASGITFSRYPMSWVRQAPGKGL |
| C1978-G1-aa | | EWVSGISDSGVSTYYADSAKGRFTISRDNSKNTLFLQMSSLRDED |
| ScFv | | TAVYYCVTRAGSEASDIWGQGTMVTVSSGGGGSGGGGSGGGGSEI |
| domain | | VLTQSPATLSLSPGERATLSCRASQSVSNSLAWYQQKPGQAPRLL |
| | | IYDASSRATGIPDRFSGSGSGTDFTLTISRLEPEDFAIYYCQQFG |
| | | TSSGLTFGGGTKLEIK |
| BCMA_EBB- | 459 | GAAGTGCAACTGGTGGAAACCGGTGGCGGCCTGGTGCAGCCTGGA |
| C1978-G1-nt | | GGATCATTGAGGCTGTCATGCGCGGCCAGCGGTATTACCTTCTCC |
| ScFv | | CGGTACCCCATGTCCTGGGTCAGACAGGCCCCGGGGAAAGGGCTT |
| domain | | GAATGGGTGTCCGGGATCTCGGACTCCGGTGTCAGCACTTACTAC |
| | | GCCGACTCCGCCAAGGGACGCTTCACCA7TTCCCGGGACAACTCG |
| | | AAGAACACCCTGTTCCTCCAAATGAGCTCCCTCCGGGACGAGGAT |
| | | ACTGCAGTGTACTACTGCGTGACCCGCGCCGGGTCCGAGGCGTCT |
| | | GACATTTGGGGACAGGGCACTATGGTCACCGTGTCGTCCGGCGGA |
| | | GGGGGCTCGGGAGGCGGTGGCAGCGGAGGAGGAGGGTCCGAGATC |
| | | GTGCTGACCCAATCCCCGGCCACCCTCTCGCTGAGCCCTGGAGAA |
| | | AGGGCAACCTTGTCCTGTCGCGCGAGCCAGTCCGTGAGCAACTCC |
| | | CTGGCCTGGTACCAGCAGAAGCCCGGACAGGCTCCGAGACTTCTG |
| | | ATCTACGACGCTTCGAGCCGGGCCACTGGAATCCCCGACCGCTTT |
| | | TCGGGGTCCGGCTCAGGAACCGATTTCACCCTGACAATCTCACGG |
| | | CTGGAGCCAGAGGATTTCGCCATCTATTACTGCCAGCAGTTCGGT |
| | | ACTTCCTCCGGCCTGACTTTCGGAGGCGGCACGAAGCTCGAAATC |
| | | AAG |
| BCMA_EBB- | 480 | EVQLVETGGGLVQPGGSLRLSCAASGITFSRYPMSWVRQAPGKGL |
| C1978-G1-aa | | EWVSGISDSGVSTYYADSAKGRFTISRDNSKNTLFLQMSSLRDED |
| VH | | TAVYYCVTRAGSEASDIWGQGTMVTVSS |
| BCMA_EBB- | 501 | EIVLTQSPATLSLSPGERATLSCRASQSVSNSLAWYQQKPGQAPR |
| C1978-G1-aa | | LLIYDASSRATGIPDRFSGSGSGTDFTLTISRLEPEDFAIYYCQQ |
| VL | | FGTSSGLTFGGGTKLEIK |

BCMA_EBB-C1979-C1

| | | |
|---|---|---|
| BCMA_EBB- | 439 | QVQLVESGGGLVQPGGSLRLSCAASGFTFSSYAMSWVRQAPGKGL |
| C1979-C1-aa | | EWVSAISGSGGSTYYADSVKGRFTISRDNAKNSLYLQMNSLRAED |
| ScFv | | TAIYYCARATYKRELRYYYGMDVWGQGTMVTVSSGGGGSGGGGSG |
| domain | | GGGSEIVMTQSPGTVSLSPGERATLSCRASQSVSSSFLAWYQQKP |
| | | GQAPRLLIYGASSRATGIFDRFSGSGSGTDFTLTISRLEPEDSAV |
| | | YYCQQYHSSPSWTFGQGTRLEIK |
| BCMA_EBB- | 460 | CAAGTGCAGCTCGTGGAATCGGGTGGCGGACTGGTGCAGCCGGGG |
| C1979-C1-nt | | GGCTCACTTAGACTGTCCTGCGCGGCCAGCGGATTCACTTTCTCC |
| ScFv | | TCCTACGCCATGTCCTGGGTCAGACAGGCCCCTGGAAAGGGCCTG |
| domain | | GAATGGGTGTCCGCAATCAGCGGCAGCGGCGGCTCGACCTATTAC |
| | | GCGGATTCAGTGAAGGGCAGATTCACCATTTCCCGGGACAACGCC |
| | | AAGAACTCCTTGTACCTTCAAATGAACTCCCTCCGCGCGGAAGAT |
| | | ACCGCAATCTAGTACTGCGCTCGGGCCACTTACAAGAGGGAACTG |
| | | CGCTACTACTACGGGATGGACGTCTGGGGCCAGGGAACCATGGTC |
| | | ACCGTGTCCAGCGGAGGAGGAGGATCGGGAGGAGGCGGTAGCGGG |
| | | GGTGGAGGGTCGGAGATCGTGATGACCCAGTCCCCCGGCACTGTG |
| | | TCGCTGTCCCCCGGCGAACGGGCCACCCTGTCATGTCGGGCCAGC |
| | | CAGTCAGTGTCGTCAAGCTTCCTCGCCTGGTACCAGCAGAAACCG |
| | | GGACAAGCTCCCCGCCTGCTGATCTACGGAGCCAGCAGCCGGGCC |
| | | ACCGGTATTCCTGACCGGTTCTCCGGTTCGGGGTCCGGGACCGAC |
| | | TTTACTCTGACTATCTCTCGCCTCGAGCCAGAGGACTCCGCCGTG |
| | | TATTACTGCCAGCAGTACCACTCCTCCCCGTCCTGGACGTTCGGA |
| | | CAGGGCACAAGGCTGGAGATTAAG |
| BCMA_EBB- | 481 | QVQLVESGGGLVQPGGSLRLSCAASGFTFSSYAMSWVRQAPGKGL |
| C1979-C1-aa | | EWVSAISGSGGSTYYADSVKGRFTISRDNAKNSLYLQMNSLRAED |
| VH | | TAIYYCARATYKRELRYYYGMDVWGQGTMVTVSS |
| BCMA_EBB- | 502 | EIVMTQSPGTVSLSPGERATLSCRASQSVSSSFLAWYQQKPGQAP |
| C1979-C1-aa | | RLLIYGASSRATGIPDRFSGSGSGTDFTLTISRLEPEDSAVYYCQ |
| VL | | QYHSSPSWTFGQGTRLEIK |

BCMA_EBB-C1978-C7

| | | |
|---|---|---|
| BCMA_EBB- | 440 | EVQLVETGGGLVQPGGSLRLSCAASGFTFSSYAMSWVRQAPGKGL |
| C1978-C7-aa | | EWVSAISGSGGSTYYADSVKGRFTISRDNSKNTLYLQMNTLKAED |
| ScFv | | TAVYYCARATYKRELRYYYGMDVWGQGTTVTVSSGGGGSGGGGSG |
| domain | | GGGSEIVLTQSPSTLSLSPGESATLSCRASQSVSTTFLAWYQQKP |
| | | GQAPRLLIYGSSNRATGIPDRFSGSGSGTDFTLTIRRLEPEDFAV |
| | | YYCQQYHSSPSWTFGQGTKVEIK |
| BCMA_EBB- | 461 | GAGGTGCAGCTTGTGGAAACCGGTGGCGGACTGGTGCAGCCCGGA |
| C1978-C7-nt | | GGAAGCCTCAGGCTGTCCTGCGCCGCGTCCGGCTTCACCTTCTCC |
| ScFv | | TCGTACGCCATGTCCTGGGTCCGCCAGGCCCCCGGAAAGGGCCTG |
| domain | | GAATGGGTGTCCGCCATCTCTGGAAGCGGAGGTTCCACGTACTAC |
| | | GCGGACAGCGTCAAGGGAAGGTTCACAATCTCCCGCGATAATTCG |
| | | AAGAACACTCTGTACCTTCAAATGAACACCCTGAAGGCCGAGGAC |
| | | ACTGCTGTGTACTACTGCGCACGGGCCACCTACAAGAGAGAGCTC |
| | | CGGTACTACTACGGAATGGACGTCTGGGGCCAGGGAACTACTGTG |
| | | ACCGTGTCCTCGGGAGGGGGTGGCTCCGGGGGGGGCGGCTCCGGC |
| | | GGAGGCGGTTCCGAGATTGTGCTGACCCAGTCACCTTCAACTCTG |
| | | TCGCTGTCCCCGGGAGAGAGCGCTACTCTGAGCTGCCGGGCCAGC |
| | | CAGTCCGTGTCCACCACCTTCCTCGCCTGGTATCAGCAGAAGCCG |
| | | GGGCAGGCACCACGGCTCTTGATCTACGGGTCAAGCAACAGAGCG |
| | | ACCGGAATTCCTGACCGCTTCTCGGGGAGCGGTTCAGGCACCGAC |
| | | TTCACCCTGACTATCCGGCGCCTGGAACCCGAAGATTTCGCCGTG |
| | | TATTACTGTCAACAGTACCACTCCTCGCCGTCCTGGACCTTTGGC |
| | | CAAGGAACCAAAGTGGAAATCAAG |
| BCMA_EBB- | 482 | EVQLVETGGGLVQPGGSLRLSCAASGFTFSSYAMSWVRQAPGKGL |
| C1979-C7-aa | | EWVSAISGSGGSTYYADSVKGRFTISRDNSKNTLYLQMNTLKAED |
| VH | | TAVYYCARATYKRELRYYYGMDVWGQGTTVTVSS |
| BCMA_EBB- | 503 | EIVTLQSPSTLSLSPGESATLSCRASQSVSTTFLAWYQQKPGQAP |
| C1979-C7-aa | | RLLIYGSSNRATGIPDRFSGSGSGTDFTLTIRRLEPEDFAVYYCQ |
| VL | | QYHSSPWSTFGQGTKVEIK |

BCMA_EBB-C1978-D10

| | | |
|---|---|---|
| BCMA_EBB- | 441 | EVQLVETGGGLVQPGRSLRLSCAASGFTFDDYAMHWVRQAPGKGL |
| C1978-D10- | | EWVSGISWNSGSIGYADSVKGRFTISRDNAKNSLYLQMNSLRDED |
| aa | | TAVYYCARVGKAVFDVWGQGTTVTVSSGGGGSGGGGSGGGGSDIV |
| ScFv | | MTQTPSSLSASVGDRVTITCRASQSISSYLNWYQQKPGKAPKLLI |
| domain | | YAASSLQSGVPSRFSGSGSGTDFTLTISSLQPEDFATYYCQQSYS |
| | | TPYSFGQGTRLEIK |
| BCMA_EBB- | 462 | GAAGTGCAGCTCGTGGAAACTGGAGGTGGACTCGTGCAGCCTGGA |
| C1978-D10- | | CGGTCGCTGCGGCTGAGCTGCGCTGCATCCGGCTTCACCTTCGAC |
| nt | | GATTATGCCATGCACTGGGTCAGACAGGCGCCAGGGAAGGGACTT |
| ScFv | | GAGTGGGTGTCCGGTATCAGCTGGAATAGCGGCTCAATCGGATAC |
| domain | | GCGGACTCCGTGAAGGGAAGGTTCACCATTTCCCGCGACAACGCC |
| | | AAGAACTCCCTGTACTTGCAAATGAACAGCCTCCGGGATGAGGAC |
| | | ACTGCCGTGTACTACTGCGCCCGCGTCGGAAAAGCTGTGCCCGAC |
| | | GTCTGGGGCCAGGGAACCACTGTGACCGTGTCCAGCGGCGGGGGT |
| | | GGATCGGGCGGTGGAGGGTCCGGTGGAGGGGGCTCAGATATTGTG |
| | | ATGACCCAGACCCCCTCGTCCCTGTCCGCCTCGGTCGGCGACCGC |
| | | GTGACTATCACATGTAGAGCCTCGCAGAGCATCTCCAGCTACCTG |
| | | AACTGGTATCAGCAGAAGCCGGGGAAGGCCCCGAAGCTCCTGATC |
| | | TACGCGGCATCATCACTGCAATCGGGAGTGCCGAGCCGGTTTTCC |
| | | GGGTCCGGCTCCGGCACCGACTTCACGCTGACCATTTCTTCCCTG |
| | | CAACCCGAGGACTTCGCCACTTACTACTGCCAGCAGTCCTACTCC |
| | | ACCCCTTACTCCTTCGGCCAAGGAACCAGGCTGGAAATCAAG |
| BCMA_EBB- | 483 | EVQLVETGGGLVQPGRSLRLSCAASGFTFDDYAMHWVRQAPGKGL |
| C1978-D10- | | EWVSGISWNSGSIGYADSVKGRFTISRDNAKNSLYLQMNSLRDED |
| aa | | TAVYYCARVGKAVPDVWGQGTTVTVSS |
| VH | | |
| BCMA_EBB- | 504 | DIVMTQTPSSLSASVGDRVTITCRASQSISSYLNWYQQKPGKAPK |
| C1978-D10- | | LLIYAASSLQSGVPSRFSGSGSGTDFTLTISSLQPEDFATYYCQQ |
| aa | | SYSTPYSFGQGTRLEIK |
| VL | | |

BCMA_EBB-C1979-C12

| | | |
|---|---|---|
| BCMA_EBB- | 442 | EVQLVESGGGLVQPGRSLRLSCTASGFTFDDYAMHWVRQRPGKGL |
| C1979-C12- | | EWVASINWKGNSLAYGDSVKGRFAISRDNAKNTVFLQMNSLRTED |
| aa | | TAVYYCASHQGVAYYNYAMDVWGRGTLVTVSSGGGGSGGGGSGGG |
| ScFv | | GSEIVLTQSPGTLSLSPGERATLSCRATQSIGSSFLAWYQQRPGQ |
| domain | | APRLLIYGASQRATGIPDRFSGRGSGTDFTLTISRVEPEDSAVYY |
| | | CQHYESSPSWTFGQGTKVEIK |
| BCMA_EBB- | 463 | GAAGTGCAGCTCGTGGAGAGCGGGGGAGGATTGGTGCAGCCCGGA |
| C1979-C12- | | AGGTCCCTGCGGCTCTCCTGCACTGCGTCTGGCTTCACCTTCGAC |
| nt | | GACTACGCGATGCACTGGGTCAGACAGCGCCCGGGAAAGGGCCTG |
| ScFv | | GAATGGGTCGCCTCAATCAACTGGAAGGGAAACTCCCTGGCCTAT |
| domain | | GGCGACAGCGTGAAGGGCCGCTTCGCCATTTCGCGCGACAACGCC |
| | | AAGAACACCGTGTTTCTGCAAATGAATTCCCTGCGGACCGAGGAT |
| | | ACCGCTGTGTACTACTGCGCCAGCCACCAGGGCGTGGCATACTAT |
| | | AACTACGCCATGGACGTGTGGGGAAGAGGGACGCTCGTCACCGTG |
| | | TCCTCCGGGGGCGGTGGATCGGGTGGAGGAGGAAGCGGTGGCGGG |
| | | GGCAGCGAAATCGTGCTGACTCAGAGCCCGGGAACTCTTTCACTG |
| | | TCCCCGGGAGAACGGGCCACTCTCTCGTGCCGGGCCACCCAGTCC |
| | | ATCGGCTCCTCCTTCCTTGCCTGGTACCAGCAGAGGCCAGGACAG |
| | | GCGCCCCGCCTGCTGATCTACGGTGCTTCCCAACGCGCCACTGGC |
| | | ATTCCTGACCGGTTCAGCGGCAGAGGGTCGGGAACCGATTTCACA |
| | | CTGACCATTTCCCGGGTGGAGCCCGAAGATTCGGCAGTCTACTAC |
| | | TGTCAGCATTACGAGTCCTCCCCTTCATGGACCTTCGGTCAAGGG |
| | | ACCAAAGTGGAGATCAAG |
| BCMA_EBB- | 484 | EVQLVESGGGLVQPGRSLRLSCTASGFTFDDYAMHwVRQRPGKGL |
| C1978-C12- | | EWVASINWKGNSLAYGDSVKGRFAISRDNAKNTVFLQMNSLRTED |
| aa | | TAVYYCASHQGVAYYNYAMDVWGRGTLVTVSS |
| VH | | |
| BCMA_EBB- | 505 | EIVLTQSPGTLSLSPGERATLSCRATQSIGSSFLAWYQQRPGQAP |
| C1978-C12- | | RLLIYGASQRATGIPDRFSGRGSGTDFTLTISRVEPEDSAVYYCQ |
| aa | | HYESSPSWTFGQGTKVEIK |
| VL | | |

BCMA_EBB-C1980-G4

| | | |
|---|---|---|
| BCMA_EBB- | 443 | EVQLVESGGGLVQPGGSLRLSCAASGFTFSSYAMSWVRQAPGKGL |
| C1980-G4-aa | | EWVSAISGSGGSTYYADSVKGRFTISRDNSKNTLYLQMNSLRAED |
| ScFv | | TAVYYCAKWRDGMDVWGQGTTVTVSSGGGGSGGGGSGGGGSEIV |
| domain | | LTQSPATLSLSPGEPATLSCRASQSVSSSYLAWYQQKPGQAPRLL |
| | | IYGASSRATGIPDRFSGNGSGTDFTLTISRLEPEDFAVYYCQQYG |
| | | SPPRFTFGPGTKVDIK |
| BCMA_EBB- | 464 | GAGGTGCAGTTGGTCGAAAGCGGGGGCGGGCTTGTGCAGCCTGGC |
| C1980-G4-nt | | GGATCACTGCGGCTGTCCTGCGCGGCATCAGGCTTCACGTTTTCT |
| ScFv | | TCCTACGCCATGTCCTGGGTGCGCCAGGCCCCTGGAAAGGGACTG |
| domain | | GAATGGGTGTCCGCGATTTCGGGGTCCGGCGGGAGCACCTACTAC |
| | | GCCGATTCCGTGAAGGGCCGCTTCACTATCTCGCGGGACAACTCC |
| | | AAGAACACCCTCTACCTCCAAATGAATAGCCTGCGGGCCGAGGAT |
| | | ACCGCCGTCTACTATTGCGCTAAGGTCGTGCGCGACGGAATGGAC |
| | | GTGTGGGGACAGGGTACCACCGTGACAGTGTCCTCGGGGGGAGGC |
| | | GGTAGCGGCGGAGGAGGAAGCGGTGGTGGAGGTTCCGAGATTGTG |
| | | CTGACTCAATCACCCGCGACCCTGAGCCTGTCCCCCGGCGAAAGG |
| | | GCCACTCTGTCCTGTCGGGCCAGCCAATCAGTCTCCTCCTCGTAC |
| | | CTGGCCTGGTACCAGCAGAAGCCAGGACAGGCTCCGAGACTCCTT |
| | | ATCTATGGCGCATCCTCCCGCGCCACCGGAATCCCGGATAGGTTC |
| | | TCGGGAAACGGATCGGGGACCGACTTCACTCTCACCATCTCCCGG |
| | | CTGGAACCGGAGGACTTCGCCGTGTACTACTGCCAGCAGTACGGC |
| | | AGCCCGCCTAGATTCACTTTCGGCCCCGGCACCAAAGTGGACATC |
| | | AAG |
| BCMA_EBB- | 485 | EVQLVESGGGLVQPGGSLRLSCAASGFTFSSYAMSWVRQAPGKGL |
| C1979-G4-aa | | EWVSAISGSGGSTYYADSVKGRFTISRDNSKNTLYLCMNSLRAED |
| VH | | TAVYYCAKWRDGMDVWGQGTTVTVSS |
| BCMA_EBB- | 506 | EIVLTQSPATLSLSPGERATLSCRASQSVSSSYLAWYQQKPGOAP |
| C1979-G4-aa | | RLLIYGASSRATGIPDRFSGNGSGTDFTLTISRLEPEDFAVYYCQ |
| VL | | QYGSPPRFTFGPGTKVDIK |

BCMA_EBB-C1980-D2

| | | |
|---|---|---|
| BCMA_EBB- | 444 | EVQLLESGGGLVQPGGSLRLSCAASGFTFSSYAMSWVRQAPGKGL |
| C1980-D2-aa | | EWVSAISGSGGSTYYADSVKGRFTISRDNSKNTLYLCWNSLRAED |
| ScFv | | TAVYYCAKIPQTGTFDYWGQGTLVTVSSGGGGSGGGGSGGGGSEI |
| domian | | VLTQSPGTLSLSPGERATLSCRASQSVSSSYLAWYQQRPGQAPRL |
| | | LIYGASSRATGIPDRFSGSGSGTDFTLTISRLEPEDFAVYYCQHY |
| | | GSSPSWTFGQGTRLEIK |
| BCMA_EBB- | 465 | GAAGTGCAGCTGCTGGAGTCCGGCGGTGGATTGGTGCAACCGGGG |
| C1980-D2-nt | | GGATCGCTCAGACTGTCCTGTGCGGCGTCAGGCTTCACCTTCTCG |
| ScFv | | AGCTACGCCATGTCATGGGTCAGACAGGCCCCTGGAAAGGGTCTG |
| domain | | GAATGGGTGTCCGCCATTTCCGGGAGCGGGGGATCTACATACTAC |
| | | GCCGATAGCGTGAAGGGCCGCTTCACCATTTCCCGGGACAACTCC |
| | | AAGAACACTCTCTATCTGCAAATGAACTCCCTCCGCGCTGAGGAC |
| | | ACTGCCGTGTACTACTGCGCCAAAATCCCTCAGACCGGCACCTTC |
| | | GAGTAGTGGGGAGAGGGGAGTCTGGTCACCGTCAGCAGCGGTGGC |
| | | GGAGGTTCGGGGGGAGGAGGAAGCGGCGGCGGAGGGTCCGAGATT |
| | | GTGCTGACCCAGTCACCCGGCACTTTGTCCCTGTCGCCTGGAGAA |
| | | AGGGCCACCCTTTCCTGCCGGGCATCCCAATCCGTGTCCTCCTCG |
| | | TACCTGGCCTGGTACCAGCAGAGGCCCGGACAGGCCCCACGGCTT |
| | | CTGATCTACGGAGCAAGCAGCCGCGCGACCGGTATCCCGGACCGG |
| | | TTTTCGGGCTCGGGCTCAGGAACTGACTTCACCCTCACCATCTCC |
| | | CGCCTGGAACCCGAAGATTTCGCTGTGTATTACTGCCAGCACTAC |
| | | GGCAGCTCCCCGTCCTGGACGTTCGGCCAGGGAACTCGGCTGGAG |
| | | ATCAAG |
| BCMA_EBB- | 486 | EVQLLESGGGLVQPGGSLRLSCAASGFTFSSYAMSWVRQAPGKGL |
| C1979-D2-aa | | EWVSAISGSGGSTYYADSVKGRFTISRDNSKNTLYLQMNSLRAED |
| VH | | TAVYYCAKIPQTGTFDYWGQGTLVTVSS |
| BCMA_EBB- | 507 | EIVLTQSPGTLSLSPGERATLSCRASQSVSSSYLAWYQQRPGQAP |
| C1979-D2-aa | | RLLIYGASSRATGIPDRFSGSGSGTDFTLTISRLEPEDFAVYYCQ |
| VL | | HYGSSPSWTFGQGTRLEIK |

BCMA_EBB-C1978-A10

| | | |
|---|---|---|
| BCMA_EBB- | 445 | EVQLVETGGGLVQPGGSLRLSCAASGFTFSSYAMSWVRQAPGKGL |
| C1978-A10- | | EWVSAISGSGGSTYYADSVKGRFTMSRENDKNSVFLQMNSLRVED |
| aa | | TGVYYCARANYKRELRYYYGMDVWGQGTMVTVSSGGGGSGGGGSG |
| ScFv | | GGGSEIVMTQSPGTLSLSPGESATLSCRASQRVASNYLAWYQHKP |
| domain | | GQAPSLLISGASSRATGVPDRFSGSGSGTDFTLAISRLEPEDSAV |
| | | YYCQHYDSSPSWTFGQGTKVEIK |
| BCMA_EBB- | 466 | GAAGTGCAACTGGTGGAAACCGGTGGAGGACTCGTGCAGCCTGGC |
| C1978-A10- | | GGCAGCCTCCGGCTGAGCTGCGCCGCTTCGGGATTCACCTTTTCC |
| nt | | TCCTACGCGATGTCTTGGGTCAGACAGGCCCCCGGAAAGGGGCTG |
| ScFv | | GAATGGGTGTCAGCCATCTCCGGCTCCGGCGGATCAACGTACTAC |
| domain | | GCCGACTCCGTGAAAGGCCGGTTCACCATGTCGCGCGAGAATGAC |
| | | AAGAACTCCGTGTTCCTGCAAATGAACTCCCTGAGGGTGGAGGAC |
| | | ACCGGAGTGTACTATTGTGCGCGCGCCAACTACAAGAGAGAGCTG |
| | | CGGTACTACTACGGAATGGACGTCTGGGGACAGGGAACTATGGTG |
| | | ACCGTGTCATCCGGTGGAGGGGGAAGCGGCGGTGGAGGCAGCGGG |
| | | GGCGGGGGTTCAGAAATTGTCATGACCCAGTCCCCGGGAACTCTT |
| | | TCCCTCTCCCCCGGGGAATCCGCGACTTTGTCCTGCCGGGCCAGC |
| | | CAGCGCGTGGCCTCGAACTACCTCGCATGGTACCAGCATAAGCCA |
| | | GGCCAAGCCCCTTCCCTGCTGATTTCCGGGGCTAGCAGCCGCGCC |
| | | ACTGGCGTGCCGGATAGGTTCTCGGGAAGCGGCTCGGGTACCGAT |
| | | TTCACCCTGGCAATCTCGCGGCTGGAACCGGAGGATTCGGCCGTG |
| | | TACTACTGCCAGCACTATGACTCATCCCCCTCCTGGACATTCGGA |
| | | CAGGGCACCAAGGTCGAGATCAAG |
| BCMA_EBB- | 487 | EVQLVETGGGLVQPGGSLRLSCAASGFTFSSYAMSWVRQAPGKGL |
| C1978-A10- | | EWVSAISGSGGSTYYADSVKGRFTMSRENDKNSVFLQMNSLRVED |
| aa | | TGVYYCARANYKRELRYYYGMDVWGQGTMVTVSS |
| VH | | |
| BCMA_EBB- | 508 | EIVMTQSPGTLSLSPGESATLSCRASQRVASNYLAWYQHKPGQAP |
| C1978-A10- | | SLLISGASSRATGVPDRFSGSGSGTDFTLAISRLEPEDSAVYYCQ |
| aa | | HYDSSPSWTFGQGTKVEIK |
| VL | | |

BCMA_EBB-C1978-D4

| | | |
|---|---|---|
| BCMA_EBB- | 446 | EVQLLETGGGLVQPGGSLRLSCAASGFSFSSYAMSWVRQAPGKGL |
| C1978-D4-aa | | EWVSAISGSGGSTYYADSVKGRFTISRDNSKNTLYLQMNSLRAED |
| ScFv | | TAVYYCAKALVGATGAFDIWGQGTLVTVSSGGGGSGGGGSGGGGS |
| domain | | EIVLTQSPGTLSLSPGERATLSCRASQSLSSNFLAWYQQKPGQAP |
| | | GLLIYGASNWATGTPDRFSGSGSGTDFTLTITRLEPEDFAVYYCQ |
| | | YYGTSPMYTFGOGTKVEIK |
| BCMA_EBB- | 467 | GAAGTGCAGCTGCTCGAAACCGGTGGAGGGCTGGTGCAGCCAGGG |
| C1978-D4-nt | | GGCTCCCTGAGGCTTTCATGCGCCGCTAGCGGATTCTCCTTCTCC |
| ScFv | | TCTTACGCCATGTCGTGGGTCCGCCAAGCCCCTGGAAAAGGCCTG |
| domain | | GAATGGGTGTCCGCGATTTCCGGGAGCGGAGGTTCGACCTATTAC |
| | | GCCGACTCCGTGAAGGGCCGCTTTACCATCTCCCGGGATAACTCC |
| | | AAGAACACTCTGTACCTCCAAATGAACTCGCTGAGAGCCGAGGAC |
| | | ACCGCCGTGTATTACTGCGCGAAGGCGCTGGTCGGCGCGACTGGG |
| | | GCATTCGACATCTGGGGACAGGGAACTCTTGTGACCGTGTCGAGC |
| | | GGAGGCGGCGGCTCCGGCGGAGGAGGGAGCGGGGGCGGTGGTTCC |
| | | GAAATCGTGTTGACTCAGTCCCCGGGAACCCTGAGCTTGTCACCC |
| | | GGGGAGCGGGCCACTCTCTCCTGTCGCGCCTCCCAATCGCTCTCA |
| | | TCCAATTTCCTGGCCTGGTACCAGCAGAAGCCCGGACAGGCCCCG |
| | | GGCCTGCTCATCTACGGCGCTTCAAACTGGGCAACGGGAACCCCT |
| | | GATCGGTTCAGCGGAAGCGGATCGGGTACTGACTTTACCCTGACC |
| | | ATCACCAGACTGGAACCGGAGGACTTCGCCGTGTACTACTGCCAG |
| | | TACTACGGCACCTCCCCCATGTACACATTCGGACAGGGTACCAAG |
| | | GTCGAGATTAAG |
| BCMA_EBB- | 488 | EVQLLETGGGLVQPGGSLRLSCAASGFSFSSYAMSWVRQAPGKGL |
| C1979-D4-aa | | EWVSAISGSGGSTYYADSVKGRFTISRDNSKNTLYLQMNSLRAED |
| VH | | TAVYYCAKALVGATGAFDIWGQGTLVTVSS |
| BCMA_EBB- | 509 | EIVLTQSPGTLSLSPGERATLSCRASQSLSSNFLAWYQQKPGQAP |
| C1979-D4-aa | | GLLIYGASNWATGTPDRFSGSGSGTDFTLTITRLEPEDFAVYYCQ |
| VL | | YYGTSPMYTFGQGTKVEIK |

BCMA_EBB-C1980-A2

| | | |
|---|---|---|
| BCMA_EBB- | 447 | EVQLLESGGGLVQPGGSLRLSCAASGFTFSSYAMSWVRQAPGKGL |
| C1980-A2-aa | | EWVSAISGSGGSTYYADSVKGRFTISRDNSKNTLYLQMNSLRAED |
| ScFv | | TAVYYCVLWFGEGFDPWGQGTLVTVSSGGGGSGGGGSGGGGSDIV |
| domain | | LTQSPLSLPVTPGEPASISCRSSQSLLHSNGYNYLDWYLQKPGQS |
| | | PQLLIYLGSNRASGVPDRFSGSGSGTDFTLKISRVEAEDVGVYYC |
| | | MQALQTPLTFGGGTKVDIK |
| BCMA_EBB- | 468 | GAAGTGCAGCTGCTTGAGAGCGGTGGAGGTCTGGTGCAGCCCGGG |
| C1980-A2-nt | | GGATCACTGCGCCTGTCCTGTGCCGCGTCCGGTTTCACTTTCTCC |
| ScFv | | TCGTACGCCATGTCGTGGGTCAGACAGGCACCGGGAAAGGGACTG |
| domain | | GAATGGGTGTCAGCCATTTCGGGTTCGGGGGGCAGCACCTACTAC |
| | | GCTGACTCCGTGAAGGGCCGGTTCACCATTTCCCGCGACAACTCC |
| | | AAGAACACCTTGTACCTCCAAATGAACTCCCTGCGGGCCGAAGAT |
| | | ACCGCCGTGTATTACTGCGTGCTGTGGTTCGGAGAGGGATTCGAC |
| | | CCGTGGGGACAAGGAACACTCGTGACTGTGTCATCCGGCGGAGGC |
| | | GGCAGCGGTGGCGGCGGTTCCGGCGGCGGCGGATCTGACATCGTG |
| | | TTGACCCAGTCCCCTCTGAGCCTGCCGGTCACTCCTGGCGAACCA |
| | | GCCAGCATCTCCTGCCGGTCGAGCCAGTCCCTCCTGCACTCCAAT |
| | | GGGTACAACTACCTCGATTGGTATCTGCAAAAGCCGGGCCAGAGC |
| | | CCCCAGCTGCTGATCTACCTTGGGTCAAACCGCGCTTCCGGGGTG |
| | | CCTGATAGATTCTCCGGGTCCGGGAGCGGAACCGACTTTACCCTG |
| | | AAAATCTCGAGGGTGGAGGCCGAGGACGTCGGAGTGTACTACTGC |
| | | ATGCAGGCGCTCCAGACTCCCCTGACCTTCGGAGGAGGAACGAAG |
| | | GTCGACATCAAGA |
| BCMA_EBB- | 489 | EVQLLESGGGLVQPGGSLRLSCAASGFTFSSYAMSWVRQAPGKGL |
| C1979-A2-aa | | EWVSAISGSGGSTYYADSVKGRFTISRDNSKNTLYLQMNSLRAED |
| VH | | TAVYYCVLWFGEGFDPWGQGTLVTV3S |
| BCMA_EBB- | 510 | DIVLTQSPLSLPVTPGEPASISCRSSQSLLHSNGYNYLDWYLQKP |
| C1979-A2-aa | | GQSPQLLIYLGSNRASGVPDRFSGSGSGTDFTLKISRVEAEDVGV |
| VL | | YYCMQALQTPLTFGGGTKVDIK |

BCMA_EBB-C1981-C3

| | | |
|---|---|---|
| BMCA_EBB- | 448 | QVQLVESGGGLVQPGGSLRLSCAASGFTFSSYAMSWVRQAPGKGL |
| C1981-C3-aa | | SWVSAISGSGGSTYYADSVKGRFTISRDNSKNTLYLQMNSLRAED |
| ScFv | | TAVYYCAKVGYDSSGYYRDYYGMDVWGQGTTVTVSSGGGGSGGGG |
| domain | | SGGGGSEIVLTQSPGTLSLSPGERATLSCRASQSVSSSYLAWYQQ |
| | | KPGQAPRLLIYGTSSRATGISDRFSGSGSGTDFTLTISRLEPEDF |
| | | AVYYCQHYGNSPPKFTFGPGTKLEIK |
| BCMA_EBB- | 469 | CAAGTGCAGCTCGTGGAGTCAGGCGGAGGACTGGTGCAGCCCGGG |
| C1981-C3-nt | | GGCTCCCTGAGACTTTCCTGCGCGGCATCGGGTTTTACCTTCTCC |
| ScFv | | TCCTATGCTATGTCCTGGGTGCGCCAGGCCCCGGGAAAGGGACTG |
| domain | | GAATGGGTGTCCGCAATCAGCGGTAGCGGGGGCTCAACATACTAC |
| | | GCCGACTCCGTCAAGGGTCGCTTCACTATTTCCCGGGACAACTCC |
| | | AAGAATACCCTGTACCTCCAAATGAACAGCCTCAGGGCCGAGGAT |
| | | ACTGCCGTGTACTACTGCGCCAAAGTCGGATACGATAGCTCCGGT |
| | | TACTACCGGGACTACTACGGAATGGACGTGTGGGGACAGGGCACC |
| | | ACCGTGACCGTGTCAAGCGGCGGAGGCGGTTCAGGAGGGGGAGGC |
| | | TCCGGCGGTGGAGGGTCCGAAATCGTCCTGACTCAGTCGCCTGGC |
| | | ACTCTGTCGTTGTCCCCGGGGGAGCGCGCTACCCTGTCGTGTCGG |
| | | GCGTCGCAGTCCCTGTCGAGCTCCTACCTCGCGTGGTACCAGCAG |
| | | AAGCCCGGACAGGCCCCTAGACTTCTGATCTACGGCACTTCTTCA |
| | | CGCGCCACCGGGATCAGCGACAGGTTCAGCGGCTCCGGCTCCGGG |
| | | ACCGACTTCACCCTGACCATTAGCCGGCTGGAGCCTGAAGATTTC |
| | | GCCGTGTATTACTGCCAACACTAGGGAAACTCGCCGCCAAAGTTC |
| | | ACGTTCGGACCCGGAACCAAGCTGGAAATCAAG |
| BCMA_EBB- | 490 | QVQLVESGGGLVQPGGSLRLSCAASGFTFSSYAMSWYRQAPGKGL |
| C1979-C3-aa | | EWVSAISGSGGSTYYADSVKGRFTISRDNSKNTLYLQMNSLRAED |
| VH | | TAVYYCAKVGYDSSGYYRDYYGMDVWGQGTTVTVSS |
| BCMA_EBB- | | EIVLTQSPGTLSLSPGERATLSCRASQSVSSSYLAWYQQKPGQAP |
| C1979-C3-aa | 511 | RLLIYGTSSRATGISDRFSGSGSGTDFTLTISRLEPEDFAVYYCQ |
| VL | | HYGNSPPKFTFGPGTKLEIK |

BCMA_EBB-C1978-G4

| | | |
|---|---|---|
| BCMA_EBB- | 449 | EVQLVESGGGLVQPGGSLRLSCAASGFTFSSYAMSWVRQAPGKGL |
| C1978-G4-aa | | EWVSAISGSGGSTYYADSVKGRFTISRDNSKNTLYLQMNSLRAED |
| ScFv | | TAVYYCAKMGWSSGYLGAFDIWGQGTTVTVSSGGGGSGGGGSGGG |
| domain | | GSEIVLTQSPGTLSLSPGERATLSCRASQSVASSFLAWYQQKPGQ |
| | | APRLLIYGASGRATGIPDRFSGSGSGTDFTLTISRLEPEDFAVYY |
| | | CQHYGGSPRLTFGGGTKVDIK |
| BCMA_EBB- | 470 | GAAGTCCAACTGGTGGAGTCCGGGGGAGGGCTCGTGCAGCCCGGA |
| C1978-G4-nt | | GGCAGCCTTCGGCTGTCGTGCGCCGCCTCCGGGTTCACGTTCTCA |
| ScFv | | TCCTACGCGATGTCGTGGGTCAGACAGGCACCAGGAAAGGGACTG |
| domain | | GAATGGGTGTCCGCCATTAGCGGCTCCGGCGGTAGCACCTACTAT |
| | | GCCGACTCAGTGAAGGGAAGGTTCACTATCTCCCGCGACAACAGC |
| | | AAGAACACCCTGTACCTCCAAATGAACTCTCTGCGGGCCGAGGAT |
| | | ACCGCGGTGTACTATTGCGCCAAGATGGGTTGGTCCAGCGGATAC |
| | | TTGGGAGCCTTCGACATTTGGGGACAGGGCACTACTGTGACCGTG |
| | | TCCTCCGGGGGTGGCGGATCGGGAGGCGGCGGCTCGGGTGGAGGG |
| | | GGTTCCGAAATCGTGTTGACCCAGTCACCGGGAACCCTCTCGCTG |
| | | TCCCCGGGAGAACGGGCTACACTGTCATGTAGAGCGTCCCAGTCC |
| | | GTGGCTTCCTCGTTCCTGGCCTGGTACCAGCAGAAGCCGGGACAG |
| | | GCACCCCGCCTGCTCATCTACGGAGCCAGCGGCCGGGCGACCGGC |
| | | ATCCCTGACCGCTTCTCCGGTTCCGGCTCGGGCACCGACTTTACT |
| | | CTGACCATTAGCAGGCTTGAGCCCGAGGATTTTGCCGTGTACTAC |
| | | TGCCAACACTACGGGGGGAGCCCTCGCCTGACCTTCGGAGGCGGA |
| | | ACTAAGGTCGATATCAAAA |
| BCMA_EBB- | 491 | EVQLVESGGGLVQPGGSLRLSCAASGFTFSSYAMSWVRQAPGKGL |
| C1979-G4-aa | | EWVSAISGSGGSTYYADSVKGRFTISRDNSKNTLYLQMNSLRAED |
| VH | | TAVYYCAKMGWSSGYLGAFDIWGQGTTVTVSS |
| BCMA_EBB- | 512 | EIVLTQSPGTLSLSPGERATLSCRASQSVASSFLAWYQQKPGQAP |
| C1979-G4-aa | | RLLIYGASGRATGIPDRFSGSGSGTDFTLTISRLEPEDFAVYYCQ |
| VL | | HYGGSPRLTFGGGTKVDIK |

[0322] In embodiments, additional exemplary BCMA CAR constructs are generated using the VH and VL sequences from PCT Publication WO2012/0163805 (the contents of which are hereby incorporated by reference in its entirety). In embodiments, additional exemplary BCMA CAR constructs are generated using the VH and VL sequences from PCT Publication WO2016/014565 (the contents of which are hereby incorporated by reference in its entirety). In embodiments, additional exemplary BCMA CAR constructs are generated using the VH and VL sequences from PCT Publication WO2014/122144 (the contents of which are hereby incorporated by reference in its entirety). In embodiments, additional exemplary BCMA CAR constructs are generated using the CAR molecules, and/or the VH and VL sequences from PCT Publication WO2016/014789 (the contents of which are hereby incorporated by reference in its entirety). In embodiments, additional exemplary BCMA CAR constructs are generated using the CAR molecules, and/or the VH and VL sequences from PCT Publication WO2014/089335 (the contents of which are hereby incorporated by reference in its entirety). In embodiments, additional exemplary BCMA CAR constructs are generated using the CAR molecules, and/or the VH and VL sequences from PCT Publication WO2014/140248 (the contents of which are hereby incorporated by reference in its entirety).

[0323] In embodiments, additional exemplary BCMA CAR constructs can also be generated using the VH and VL sequences found in Table 13. The amino acid sequences of exemplary scFv domains comprising the VH and VL domains and a linker sequence, and full-length CARs are also found in Table 13.

TABLE 13
Additional exemplary BCMA binding domain sequences

| Name | Sequence | SEQ ID NO: |
|---|---|---|
| A7D12.2 | QIQLVQSGPDLKKPGETVKLSCKASGYTFTNFGMNWVKQAPGKGFKWMAWINTYTGESYFA | 555 |
| VH | DDFKGRFAFSVETSATTAYLQINNLKTEDTATYFCARGEIYYGYDGGFAYWGQGTLVTVSA | |
| A7D12.2 | DVVMTQSHRFMSTSVGDRVSITCRASQDVNTAVSWYQQKPGQSPKLLIFSASYRYTGVPDR | 559 |
| VL | FTGSGSGADFTLTISSVQAEDLAVYYCQQHYSTPWTFGGGTKLDIK | |
| A7D12.2 | QIQLVQSGPDLKKPGETVKLSCKASGYTFTNFGMNWVKQAPGKGFKWMAWINTYTGESYFA | 563 |
| scFv | DDFKGRFAFSVETSATTAYLQINNLKTEDTATYFCARGEIYYGYDGGFAYWGQGTLVTVSA | |
| domain | GGGGSGGGGSGGGGSDVVMTQSHRFMSTSVGDRVSITCRASQDVNTAVSWYQQKPGQSPKL | |
| | LIFSASYRYTGVPDRFTGSGSGADFTLTISSVQAEDLAVYYCQQHYSTPWTFGGGTKLDIK | |
| C11D5.3 | QIQLVQSGPELKKPGETVKISCKASGYTFTDYSINWVKRAPGKGLKWMGWINTETREPAYA | 556 |
| VH | YDFRGRFAFSLETSASTAYLQINNLKYEDTATYFCALDYSYAMDYWGQGTSVTVSS | |
| C11D5.3 | DIVLTQSPASLAMSLKGRATISCRASESVSVIGAHLIHWYQQKPGQPPKLLIYLASNLETG | 560 |
| VL | VPARFSGSGSGTDFTLTIDPVEEDDVAIYSCLQSRIFPRTFGGGTKLEIK | |
| C11D5.3 | QIQLVQSGPELKKPGETVKISCKASGYTFTDYSINWVKRAPGKGLKWMGWINTETREPAYA | 564 |
| scFv | YDFRGRFAFSLETSASTAYLQINNLKYEDTATYFCALDYSYAMDYWGQGTSVTVSSGGGGS | |
| domain | GGGGSGGGGSQIQLVQSGPELKKPGETVKISCKASGYTFTDYSINWVKRAPGKGLKWMGWI | |
| | NTETREPAYAYDFRGRFAFSLETSASTAYLQINNLKYEDTATYFCALDYSYAMDYWGQGTS | |
| | VTVSS | |
| C12A3.2 | QIQLVQSGPELKKPGETVKISCKASGYTFRHYSMNWVKQAPGKGLKWMGRINTESGVPIYA | 557 |
| VH | DDFKGRFAFSVETSASTAYLNINNLKDEDTASYFCSNDYLYSLDFWGQGTALTVSS | |
| C12A3.2 | DIVLTQSPPSLAMSLGKRATISCRASESVTILGSHLIYWYQQKPGQPPTLLIQLASNVQTG | 561 |
| VL | VPARFSGSGSRTDFTLTIDPVEEDDVAVYYCLQSRTIPRTFGGGTKLEIK | |
| C12A3.2 | QIQLVQSGPELKKPGETVKISCKASGYTFRHYSMNWVKQAPGKGLKWMGRINTESGVPIYA | 565 |
| scFv | DDFKGRFAFSVETSASTAYLVINNLKDEDTASYFCSNDYLYSLDFWGQGTALTVSSGGGGS | |
| domain | GGGGSGGGGSDIVLTQSPPSLAMSLGKRATISCRASESVTILGSHLIYWYQQKPGQPPTLL | |
| | IQLASNVQTGVPARFSGSGSRTDFTLTIDPVEEDDVAVYYCLQSRTIPRTFGGGTKLEIK | |
| C13F12.1 | QIQLVQSGPELKKPGETVKISCKASGYTFTHYSMNWVKQAPGKGLKWMGRINTETGEPLYA | 558 |
| VH | DDFKGRFAFSLETSASTAYLVINNLKNEDTATFFCSNDYLYSCDYWGQGTTLTVSS | |
| C13F12.1 | DIVLTQSPPSLAMSLGKRATISCRASESVTILGSHLIYWYQQKPGQPPTLLIQLASNVQTG | 562 |
| VL | VPARFSGSGSRTDFTLTIDPVEEDDVAVYYCLQSRTIPRTFGGGTKLIEK | |
| C13F12.1 | QIQLVQSGPELKKPGETVKISCKASGYTFTHYSMNWVKQAPGKGLKWMGRINTETGEPLYA | 566 |
| scFv | DDFKGRFAFSLETSASTAYLVINNLKNEDTATFFCSNDYLYSCDYWGQGTTLTVSSGGGGS | |
| domain | GGGGSGGGGSDIVLTQSPPSLAMSLGKRATISCRASESVTILGSHLIYWYQQKPQPPPTLL | |
| | IQLASNVQTGVPARFSGSGSRTDFTLTIDPVEEDDVAVYYCLQSRTIPRTFGGGTKLEIK | |

[0324] The sequences of human CDR sequences of the scFv domains are shown in Table 14 for the heavy chain variable domains and in Table 15 for the light chain variable domains. “ID” stands for the respective SEQ ID NO for each CDR. The CDRs are shown according to the Kabat definition, however, the CDRs under other convention, for example, Chothia or the combined Kabat/Chothia definitions may be readily deduced based on the VH and VL sequences above.

TABLE 14
Heavy Chain Variable Domain CDRs according to the Kabat numbering scheme
(Kabat et al. 1991), “Sequences of Proteins of Immunological Interest,”
5th Ed. Public Health Service, National Institutes of Health, Bethesda, MD)

| Candidate | HCDR1 | ID | HCDR2 | ID | HCDR3 | ID |
|---|---|---|---|---|---|---|
| 139109 | NHGMS | 694 | GIVYSGSTYYAASVKG | 734 | HGGESDV | 774 |
| 139103 | NYAMS | 684 | GISRSSGENTYYADSVKG | 724 | SPAHYYGGMDV | 764 |
| 139105 | DYAMH | 685 | GISWNSGSIGYADSVKG | 725 | HSFLAY | 765 |
| 139111 | NHGMS | 686 | GIVYSGSTYYAASVKG | 726 | HGGESDV | 766 |
| 139100 | NFGIN | 687 | WINPKNNNTNYAQKFQG | 727 | GPYYYQSYMDV | 767 |
| 139101 | SDAMT | 688 | VISGSGGTTYYADSVKG | 728 | LDSSGYYYARGPRY | 768 |
| 139102 | NYGIT | 689 | WISAYNGNTNYAQKFQG | 729 | GPYYYYMDV | 769 |
| 139104 | NHGMS | 690 | GIVYSGSTYYAASVKG | 730 | HGGESDV | 770 |
| 139106 | NHGMS | 691 | GIVYSGSTYYAASVKG | 731 | HGGESDV | 771 |
| 139107 | NHGMS | 692 | GIVYSGSTYYAASVKG | 732 | HGGESDV | 772 |
| 139108 | DYYMS | 693 | YISSSGSTIYYADSVKG | 733 | ESGDGMDV | 773 |
| 139110 | DYYMS | 695 | YISSSGNTIYYADSVKG | 735 | STMVREDY | 775 |
| 139112 | NHGMS | 696 | GIVYSGSTYYAASVKG | 736 | HGGESDV | 776 |
| 139113 | NHGMS | 697 | GIVYSGSTYYAASVKG | 737 | HGGESDV | 777 |
| 139114 | NHGMS | 698 | GIVYSGSTYYAASVKG | 738 | HGGESDV | 778 |
| 149362 | SSYYYWG | 699 | SIYYSGSAYYNPSLKS | 739 | HWQEWPDAFDI | 779 |
| 149363 | TSGMCVS | 700 | RIDWDEDKFYSTSLKT | 740 | SGAGGTSATAFDI | 780 |
| 149364 | SYSMN | 701 | SISSSSSYIYYADSVKG | 741 | TIAAVYAFDI | 781 |
| 149365 | DYYMS | 702 | YISSSGSTIYYADSVKG | 742 | DLRGAFDI | 782 |
| 149366 | SHYIH | 703 | MINPSGGVTAYSQTLQG | 743 | EGSGSGWYFDF | 783 |
| 149367 | SGGYYWS | 704 | YIYYSGSTYYNPSLKS | 744 | AGIAARLRGAFDI | 784 |
| 149368 | SYAIS | 705 | GIIPIFGTANYAQKFQG | 745 | FGGYQLLRWDVGLLRSAFDI | 785 |
| 149369 | SNSAAWN | 706 | RTYYRSKWYSFYAISLKS | 746 | SSPEGLFLYWFDP | 786 |
| BCMA_EBB-C1978-A4 | SYAMS | 707 | AISGSGGSTYYADSVKG | 747 | VEGSGSLDY | 787 |
| BCMA_EBB-C1978-G1 | RYPMS | 708 | GISDSGVSTYYADSVAKG | 748 | RAGSEASDI | 788 |
| BCMA_EBB-C1979-C1 | SYAMS | 709 | AISGSGGSTYYADSVKG | 749 | ATYKRELRYYYGMDV | 789 |
| BCMA_EBB-C1978-C7 | SYAMS | 710 | AISGSGGSTYYADSVKG | 750 | ATYKRELRYYYGMDV | 790 |
| BCMA_EBB-C1978-D10 | DYAMH | 711 | GISWNSGSIGYADSVKG | 751 | VKGAVPDV | 791 |
| BCMA_EBB-C1979-C12 | DYAMH | 712 | SINWKGNSLAYGDSVKG | 752 | HQGVAYYNYAMDV | 792 |
| BCMA_EBB-C1980-G4 | SYAMS | 713 | AISGSGGSTYYADSVKG | 753 | VVRDGMDV | 793 |
| BCMA_EBB-C1980-D2 | SYAMS | 714 | AISGSGGSTYYADSVKG | 754 | IPQTGTFDY | 794 |
| BCMA_EBB-C1978-A10 | SYAMS | 715 | AISGSGGSTYYADSVKG | 755 | ANYKRELRYYYGMDV | 795 |
| BCMA_EBB-C1978-D4 | SYAMS | 716 | AISGSGGSTYYADSVKG | 756 | ALVGATGAFDI | 796 |
| BCMA_EBB-C1980-A2 | SYAMS | 717 | AISGSGGSTYYADSVKG | 757 | WFGEGFDP | 797 |
| BCMA_EBB-C1981-C3 | SYAMS | 718 | AISGSGGSTYYADSVKG | 758 | VGYDSSGYYRDYYGMDV | 799 |
| BCMA_EBB-C1978-G4 | SYAMS | 719 | AISGSGGSTYYADSVKG | 759 | MGWSSGYLGAFDI | 799 |
| A7D12.2 | NFGMN | 720 | WINTYTGESYFADDFKG | 760 | GEIYYGYDGGFAY | 800 |
| C11D5.3 | DYSIN | 721 | WINTETREPAYAYDFRG | 761 | DYSYAMDY | 801 |
| C12A3.2 | HYSMN | 722 | RINTESGVPIYADDFKG | 762 | DYLYSLDF | 802 |
| C13F12.1 | HYSMN | 723 | RINTETGEPLYADDFKG | 763 | DYLYSCDY | 803 |

TABLE 15
Light Chain Variable Domain CDRs according to the Kabat numbering
scheme (Kabat et al. 1991), “Sequences of
Proteins of Immunological Interest,” 5th Ed. Public Health
Service, National Institutes of Health, Bethesda, MD)

| Candidate | LCDR1 | ID | LCDR2 | ID | LCDR3 | ID |
|---|---|---|---|---|---|---|
| 139109 | RASQSISSYLN | 814 | AASSLQS | 854 | QQSYSTPYT | 894 |
| 139103 | RASQSISSSFLA | 804 | GASRRAT | 844 | QQYHSSPSWT | 884 |
| 139105 | RSSQSLLHSNGYNYLD | 805 | LGSNRAS | 845 | MQALQTPYT | 885 |
| 139111 | KSSQSLLRNDGKTPLY | 806 | EVSNRFS | 846 | MQNIQFPS | 886 |
| 139100 | RSSQSLLHSNGYNYLN | 807 | LGSKRAS | 847 | MQALQTPYT | 887 |
| 139101 | RASQSISSYLN | 808 | GASTLAS | 848 | QQSYKRAS | 888 |
| 139102 | RSSQSLLYSNGYNYVD | 809 | LGSNRAS | 849 | MQGRQFPYS | 889 |
| 139104 | RASQSVSSNLA | 810 | GASTRAS | 850 | QQYGSSLT | 890 |
| 139106 | RASQSVSSKLA | 811 | GASIRAT | 851 | QQYGSSSWT | 891 |
| 139107 | RASQSVGSTNLA | 812 | DASNRAT | 852 | QQYGSSPPWT | 892 |
| 139108 | RASQSISSYLN | 813 | AASSLQS | 853 | QQSYTLA | 893 |
| 139110 | KSSESLVHNSGKTYLN | 815 | EVSNRDS | 855 | MQGHTWPGT | 895 |
| 139112 | QASEDINKFLN | 816 | DASTLQT | 856 | QQYESLPLT | 896 |
| 139113 | RASQSVGSNLA | 817 | GASTRAT | 857 | QQYNDWLPVT | 897 |
| 139114 | RASQSIGSSSLA | 818 | GASSRAS | 858 | QQYAGSPPFT | 898 |
| 149362 | KASQDIDDAMN | 819 | SATSPVP | 859 | LQHDNFPLT | 899 |
| 149363 | RASQDIYNNLA | 820 | AANKSQS | 860 | QHYYRFPYS | 900 |
| 149364 | RSSQSLLHSNGYNYLD | 821 | LGSNRAS | 861 | MQALQTPYT | 901 |
| 149365 | GGNNIGTKSVH | 822 | DDSVRPS | 862 | QVWDSDSEHVV | 902 |
| 149366 | SGDGLSKKYVS | 823 | RDKERPS | 863 | QASDDTTVV | 903 |
| 149367 | RASQGIRNWLA | 824 | AASNLQS | 864 | QKYNSAPFT | 904 |
| 149368 | GGNNIGKSKSVH | 825 | GKNNRPS | 865 | SSRDSSGDHLRV | 905 |
| 149369 | QGDSLGNYYAT | 826 | GTNNRPS | 866 | NSRDSSGHHLL | 906 |
| BCMA_EBB-C1978-A4 | RASQSVSSAYLA | 827 | GASTRAT | 867 | QHYGSSFNGSSLFT | 907 |
| BCMA_EBB-C1978-G1 | RASQSVSNSLA | 828 | DASSRAT | 868 | QQFGTSSGLT | 908 |
| BCMA_EBB-C1979-C1 | RASQSVSSSFLA | 829 | GASSRAT | 869 | QQYHSSPSWT | 909 |
| BCMA_EBB-C1978-C7 | RASQSVSTTFLA | 830 | GSSNRAT | 870 | QQYHSSPSWT | 910 |
| BCMA_EBB-C1978-D10 | RASQSISSYLN | 831 | AASSLQS | 871 | QQSYSTPYS | 911 |
| BCMA_EBB-C1979-C12 | RATQSIGSSFLA | 832 | GASQRAT | 872 | QHYESSPSWT | 912 |
| BCMA_EBB-C1980-G4 | RASQSVSSSYLA | 833 | GASSRAT | 873 | QQYGSPPRFT | 913 |
| BCMA_EBB-C1980-D2 | RASQSVSSSYLA | 834 | GASSRAT | 874 | QHYGSSPSWT | 914 |
| BCMA_EBB-C1978-A10 | RASQRVASNYLA | 835 | GASSRAT | 875 | QHYDSSPSWT | 915 |
| BCMA_EBB-C1978-D4 | RASQSLSSNFLA | 836 | GASNWAT | 876 | QYYGTSPMYT | 916 |
| BCMA_EBB-C1980-A2 | RSSQSLLHSNGYNYLD | 837 | LGSNRAS | 877 | MQALQTPLT | 917 |
| BCMA_EBB-C1981-C3 | RASQSVSSSYLA | 838 | GTSSRAT | 878 | QHYGNSPPKFT | 918 |
| BCMA_EBB-C1978-G4 | RASQSVASSFLA | 839 | GASGRAT | 879 | QHYGGSPRLT | 919 |
| A7D12.2 | RASQDVNTAVS | 840 | SASYRYT | 880 | QQHYSTPWT | 920 |
| C11D5.3 | RASESVSVIGAHLIH | 841 | LASNLET | 881 | LQSRIFPRT | 921 |
| C12A3.2 | RASESVTILGSHLIY | 842 | LASNVQT | 882 | LSQRTIPRT | 922 |
| C13F12.1 | RASESVTILGSHLIY | 843 | LASNVQT | 883 | LSQRTIPRT | 923 |

[0325] In one embodiment, the BCMA binding domain comprises one or more (e.g., all three) light chain complementary determining region 1 (LC CDR1), light chain complementary determining region 2 (LC CDR2), and light chain complementary determining region 3 (LC CDR3) of a BCMA binding domain described herein, e.g., provided in Table 12, 13 or 15, and/or one or more (e.g., all three) heavy chain complementary determining region 1 (HC CDR1), heavy chain complementary determining region 2 (HC CDR2), and heavy chain complementary determining region 3 (HC CDR3) of a BCMA binding domain described herein, e.g., provided in Table 12, 13 or 14. In one embodiment, the BCMA binding domain comprises one, two, or all of LC CDR1, LC CDR2, and LC CDR3 of any amino acid sequences as provided in Table 12, incorporated herein by reference; and one, two or all of HC CDR1, HC CDR2, and HC CDR3 of any amino acid sequences as provided in Table 12.

[0326] In one embodiment, the BCMA antigen binding domain comprises:
[0327] (v) (a) a LC CDR1 amino acid sequence of SEQ ID NO: 814, a LC CDR2 amino acid sequence of SEQ ID NO: 854, and a LC CDR3 amino acid sequence of SEQ ID NO: 894; and
[0328] (b) a HC CDR1 amino acid sequence of SEQ ID NO: 694, a HC CDR2 amino acid sequence of SEQ ID NO: 734, and a HC CDR3 amino acid sequence of SEQ ID NO: 774
[0329] (vi) (a) a LC CDR1 amino acid sequence of SEQ ID NO: 804, a LC CDR2 amino acid sequence of SEQ ID NO: 844, and a LC CDR3 amino acid sequence of SEQ ID NO: 884; and
[0330] (b) a HC CDR1 amino acid sequence of SEQ ID NO: 684, a HC CDR2 amino acid sequence of SEQ ID NO: 724, and a HC CDR3 amino acid sequence of SEQ ID NO: 764
[0331] (vii) (a) a LC CDR1 amino acid sequence of SEQ ID NO: 805, a LC CDR2 amino acid sequence of SEQ ID NO: 845, and a LC CDR3 amino acid sequence of SEQ ID NO: 885; and
[0332] (b) a HC CDR1 amino acid sequence of SEQ ID NO: 685, a HC CDR2 amino acid sequence of SEQ ID NO: 725, and a HC CDR3 amino acid sequence of SEQ ID NO: 765
[0333] (viii) (a) a LC CDR1 amino acid sequence of SEQ ID NO: 806, a LC CDR2 amino acid sequence of SEQ ID NO: 846, and a LC CDR3 amino acid sequence of SEQ ID NO: 886; and
[0334] (b) a HC CDR1 amino acid sequence of SEQ ID NO: 686, a HC CDR2 amino acid sequence of SEQ ID NO: 726, and a HC CDR3 amino acid sequence of SEQ ID NO: 766
[0335] (ix) (a) a LC CDR1 amino acid sequence of SEQ ID NO: 807, a LC CDR2 amino acid sequence of SEQ ID NO: 847, and a LC CDR3 amino acid sequence of SEQ ID NO: 887; and
[0336] (b) a HC CDR1 amino acid sequence of SEQ ID NO: 687, a HC CDR2 amino acid sequence of SEQ ID NO: 727, and a HC CDR3 amino acid sequence of SEQ ID NO: 767
[0337] (x) (a) a LC CDR1 amino acid sequence of SEQ ID NO: 808, a LC CDR2 amino acid sequence of SEQ ID NO: 848, and a LC CDR3 amino acid sequence of SEQ ID NO: 888; and
[0338] (b) a HC CDR1 amino acid sequence of SEQ ID NO: 688, a HC CDR2 amino acid sequence of SEQ ID NO: 728, and a HC CDR3 amino acid sequence of SEQ ID NO: 768
[0339] (xi) (a) a LC CDR1 amino acid sequence of SEQ ID NO: 809, a LC CDR2 amino acid sequence of SEQ ID NO: 849, and a LC CDR3 amino acid sequence of SEQ ID NO: 889; and
[0340] (b) a HC CDR1 amino acid sequence of SEQ ID NO: 689, a HC CDR2 amino acid sequence of SEQ ID NO: 729, and a HC CDR3 amino acid sequence of SEQ ID NO: 769
[0341] (xii) (a) a LC CDR1 amino acid sequence of SEQ ID NO: 810, a LC CDR2 amino acid sequence of SEQ ID NO: 850, and a LC CDR3 amino acid sequence of SEQ ID NO: 890; and
[0342] (b) a HC CDR1 amino acid sequence of SEQ ID NO: 690, a HC CDR2 amino acid sequence of SEQ ID NO: 730, and a HC CDR3 amino acid sequence of SEQ ID NO: 770
[0343] (xiii) (a) a LC CDR1 amino acid sequence of SEQ ID NO: 811, a LC CDR2 amino acid sequence of SEQ ID NO: 851, and a LC CDR3 amino acid sequence of SEQ ID NO: 891; and
[0344] (b) a HC CDR1 amino acid sequence of SEQ ID NO: 691, a HC CDR2 amino acid sequence of SEQ ID NO: 731, and a HC CDR3 amino acid sequence of SEQ ID NO: 771
[0345] (xiv) (a) a LC CDR1 amino acid sequence of SEQ ID NO: 812, a LC CDR2 amino acid sequence of SEQ ID NO: 852, and a LC CDR3 amino acid sequence of SEQ ID NO: 892; and
[0346] (b) a HC CDR1 amino acid sequence of SEQ ID NO: 692, a HC CDR2 amino acid sequence of SEQ ID NO: 732, and a HC CDR3 amino acid sequence of SEQ ID NO: 772
[0347] (xv) (a) a LC CDR1 amino acid sequence of SEQ ID NO: 813, a LC CDR2 amino acid sequence of SEQ ID NO: 853, and a LC CDR3 amino acid sequence of SEQ ID NO: 893; and
[0348] (b) a HC CDR1 amino acid sequence of SEQ ID NO: 693, a HC CDR2 amino acid sequence of SEQ ID NO: 733, and a HC CDR3 amino acid sequence of SEQ ID NO: 773
[0349] (xvi) (a) a LC CDR1 amino acid sequence of SEQ ID NO: 815, a LC CDR2 amino acid sequence of SEQ ID NO: 855, and a LC CDR3 amino acid sequence of SEQ ID NO: 895; and
[0350] (b) a HC CDR1 amino acid sequence of SEQ ID NO: 695, a HC CDR2 amino acid sequence of SEQ ID NO: 735, and a HC CDR3 amino acid sequence of SEQ ID NO: 775
[0351] (xvii) (a) a LC CDR1 amino acid sequence of SEQ ID NO: 816, a LC CDR2 amino acid sequence of SEQ ID NO: 856, and a LC CDR3 amino acid sequence of SEQ ID NO: 896; and
[0352] (b) a HC CDR1 amino acid sequence of SEQ ID NO: 696, a HC CDR2 amino acid sequence of SEQ ID NO: 736, and a HC CDR3 amino acid sequence of SEQ ID NO: 776
[0353] (xviii) (a) a LC CDR1 amino acid sequence of SEQ ID NO: 817, a LC CDR2 amino acid sequence of SEQ ID NO: 857, and a LC CDR3 amino acid sequence of SEQ ID NO: 897; and
[0354] (b) a HC CDR1 amino acid sequence of SEQ ID NO: 697, a HC CDR2 amino acid sequence of SEQ ID NO: 737, and a HC CDR3 amino acid sequence of SEQ ID NO: 777
[0355] (xix) (a) a LC CDR1 amino acid sequence of SEQ ID NO: 818, a LC CDR2 amino acid sequence of SEQ ID NO: 858, and a LC CDR3 amino acid sequence of SEQ ID NO: 898; and
[0356] (b) a HC CDR1 amino acid sequence of SEQ ID NO: 698, a HC CDR2 amino acid sequence of SEQ ID NO: 738, and a HC CDR3 amino acid sequence of SEQ ID NO: 778
[0357] (xx) (a) a LC CDR1 amino acid sequence of SEQ ID NO: 819, a LC CDR2 amino acid sequence of SEQ ID NO: 859, and a LC CDR3 amino acid sequence of SEQ ID NO: 899; and
[0358] (b) a HC CDR1 amino acid sequence of SEQ ID NO: 699, a HC CDR2 amino acid sequence of SEQ ID NO: 739, and a HC CDR3 amino acid sequence of SEQ ID NO: 779
[0359] (xxi) (a) a LC CDR1 amino acid sequence of SEQ ID NO: 820, a LC CDR2 amino acid sequence of SEQ ID NO: 860, and a LC CDR3 amino acid sequence of SEQ ID NO: 900; and
[0360] (b) a HC CDR1 amino acid sequence of SEQ ID NO: 700, a HC CDR2 amino acid sequence of SEQ ID NO: 740, and a HC CDR3 amino acid sequence of SEQ ID NO: 780
[0361] (xxii) (a) a LC CDR1 amino acid sequence of SEQ ID NO: 821, a LC CDR2 amino acid sequence of SEQ ID NO: 861, and a LC CDR3 amino acid sequence of SEQ ID NO: 901; and
[0362] (b) a HC CDR1 amino acid sequence of SEQ ID NO: 701, a HC CDR2 amino acid sequence of SEQ ID NO: 741, and a HC CDR3 amino acid sequence of SEQ ID NO: 781
[0363] (xxiii) (a) a LC CDR1 amino acid sequence of SEQ ID NO: 822, a LC CDR2 amino acid sequence of SEQ ID NO: 862, and a LC CDR3 amino acid sequence of SEQ ID NO: 902; and
[0364] (b) a HC CDR1 amino acid sequence of SEQ ID NO: 702, a HC CDR2 amino acid sequence of SEQ ID NO: 742, and a HC CDR3 amino acid sequence of SEQ ID NO: 782
[0365] (xxiv) (a) a LC CDR1 amino acid sequence of SEQ ID NO: 823, a LC CDR2 amino acid sequence of SEQ ID NO: 863, and a LC CDR3 amino acid sequence of SEQ ID NO: 903; and
[0366] (b) a HC CDR1 amino acid sequence of SEQ ID NO: 703, a HC CDR2 amino acid sequence of SEQ ID NO: 743, and a HC CDR3 amino acid sequence of SEQ ID NO: 783
[0367] (xxv) (a) a LC CDR1 amino acid sequence of SEQ ID NO: 824, a LC CDR2 amino acid sequence of SEQ ID NO: 864, and a LC CDR3 amino acid sequence of SEQ ID NO: 904; and
[0368] (b) a HC CDR1 amino acid sequence of SEQ ID NO: 704, a HC CDR2 amino acid sequence of SEQ ID NO: 744, and a HC CDR3 amino acid sequence of SEQ ID NO: 784
[0369] (xxvi) (a) a LC CDR1 amino acid sequence of SEQ ID NO: 825, a LC CDR2 amino acid sequence of SEQ ID NO: 865, and a LC CDR3 amino acid sequence of SEQ ID NO: 905; and
[0370] (b) a HC CDR1 amino acid sequence of SEQ ID NO: 705, a HC CDR2 amino acid sequence of SEQ ID NO: 745, and a HC CDR3 amino acid sequence of SEQ ID NO: 785 or
[0371] (xxvii) (a) a LC CDR1 amino acid sequence of SEQ ID NO: 826, a LC CDR2 amino acid sequence of SEQ ID NO: 866, and a LC CDR3 amino acid sequence of SEQ ID NO: 906; and
[0372] (b) a HC CDR1 amino acid sequence of SEQ ID NO: 706, a HC CDR2 amino acid sequence of SEQ ID NO: 746, and a HC CDR3 amino acid sequence of SEQ ID NO: 786.

[0373] In one embodiment, the BCMA binding domain comprises a light chain variable region described herein (e.g., in Table 12 or 13) and/or a heavy chain variable region described herein (e.g., in Table 12 or 13). In one embodiment, the BCMA binding domain is a scFv comprising a light chain and a heavy chain of an amino acid sequence listed in Table 12 or 13. In an embodiment, the BCMA binding domain (e.g., an scFv) comprises: a light chain variable region comprising an amino acid sequence having at least one, two or three modifications (e.g., substitutions, e.g., conservative substitutions) but not more than 30, 20 or 10 modifications (e.g., substitutions, e.g., conservative substitutions) of an amino acid sequence of a light chain variable region provided in Table 12 or 13, or a sequence with 95-99% identity with an amino acid sequence provided in Table 12 or 13, and/or a heavy chain variable region comprising an amino acid sequence having at least one, two or three modifications (e.g., substitutions, e.g., conservative substitutions) but not more than 30, 20 or 10 modifications (e.g., substitutions, e.g., conservative substitutions) of an amino acid sequence of a heavy chain variable region provided in Table 12 or 13, or a sequence with 95-99% identity to an amino acid sequence provided in Table 12 or 13.

[0374] In one embodiment, the BCMA binding domain comprises an amino acid sequence selected from a group consisting of SEQ ID NO: 349; SEQ ID NO: 339, SEQ ID NO: 340; SEQ ID NO: 341; SEQ ID NO: 342; SEQ ID NO: 343; SEQ ID NO: 344, SEQ ID NO: 345, SEQ ID NO: 346, SEQ ID NO: 347, SEQ ID NO: 348, SEQ ID NO: 350, SEQ ID NO: 351, SEQ ID NO: 352, SEQ ID NO: 353, SEQ ID NO: 429, SEQ ID NO: 430, SEQ ID NO: 431, SEQ ID NO: 432, SEQ ID NO: 433, SEQ ID NO: 434, SEQ ID NO: 435, SEQ ID NO: 436, SEQ ID NO: 437, SEQ ID NO: 438, SEQ ID NO: 439, SEQ ID NO: 440, SEQ ID NO: 441, SEQ ID NO: 442, SEQ ID NO: 443, SEQ ID NO: 444, SEQ ID NO: 445, SEQ ID NO: 446, SEQ ID NO: 447, SEQ ID NO: 448, SEQ ID NO: 449, SEQ ID NO: 563, SEQ ID NO: 564, SEQ ID NO: 565 and SEQ ID NO: 566; or an amino acid sequence having at least one, two or three modifications (e.g., substitutions, e.g., conservative substitutions) but not more than 30, 20 or 10 modifications (e.g., substitutions, e.g., conservative substitutions) to any of the aforesaid sequences; or a sequence with 95-99% identity to any of the aforesaid sequences. In one embodiment, the BCMA binding domain is a scFv, and a light chain variable region comprising an amino acid sequence described herein, e.g., in Table 12 or 13, is attached to a heavy chain variable region comprising an amino acid sequence described herein, e.g., in Table 12 or 13, via a linker, e.g., a linker described herein. In one embodiment, the BCMA binding domain includes a (Gly4-Ser)n linker, wherein n is 1, 2, 3, 4, 5, or 6, preferably 4 (SEQ ID NO: 80). The light chain variable region and heavy chain variable region of a scFv can be, e.g., in any of the following orientations: light chain variable region-linker-heavy chain variable region or heavy chain variable region-linker-light chain variable region.

[0375] Any known BCMA CAR, e.g., the BMCA antigen binding domain of any known BCMA CAR, in the art can be used in accordance with the instant invention to construct a BCA CAR For example, those described herein. As another example, the BCMA CAR comprises an anti-BCMA binding domain or portion thereof, e.g., CDRs, of a CAR or antigen binding domain described in, e.g., WO2016/094304, WO2016/014789, or U.S. Pat. No. 9,034,324 (e.g., C11D5 of U.S. Pat. No. 9,034,324), the contents of each of which are hereby incorporated by reference in their entirety.

[0376] In one embodiment, an antigen binding domain against ROR1 is an antigen binding portion, e.g., CDRs, of an antibody described in, e.g., Hudecek et al., Clin Cancer Res 19(12):3153-3164 (2013); WO 2011159847; and US20130101607.

[0377] In one embodiment, an antigen binding domain against CD22 is an antigen binding portion, e.g., CDRs, of an antibody described in, e.g., Haso et al., Blood, 121(7): 1165-1174 (2013); Wayne et al., Clin Cancer Res 16(6): 1894-1903 (2010); Kato et al., Leuk Res 37(1):83-88 (2013); Creative BioMart (creativebiomart.net): MOM-18047-S(P). In an aspect, an antigen binding domain against CD22 is an antigen binding portion, e.g., CDRs, VL and VH, or scFV, of an antigen binding domain or CAR described in, e.g., WO2016/164731 (e.g., as described in Table 6A of WO2016/164731), the contents of which is hereby incorporated by reference in its entirety.

[0378] In one embodiment, an antigen binding domain against CD20 is an antigen binding portion, e.g., CDRs, of the antibody Rituximab, Ofatumumab, Ocrelizumab, Veltuzumab, or GA101, or derivatives thereof. In an aspect, an antigen binding domain against CD20 is an antigen binding portion, e.g., CDRs, VL and VH, or scFV, of an antigen binding domain or CAR described in, e.g., WO2016/164731 (e.g., as described in Table 11A or 11B of WO2016/164731), the contents of which is hereby incorporated by reference in its entirety.

[0379] In one embodiment, the antigen binding domain comprises one, two three (e.g., all three) heavy chain CDRs, HC CDR1, HC CDR2 and HC CDR3, from an antibody listed above, and/or one, two, three (e.g., all three) light chain CDRs, LC CDR1, LC CDR2 and LC CDR3, from an antibody that binds a tumor antigen or a B cell antigen listed above. In one embodiment, the antigen binding domain comprises a heavy chain variable region and/or a variable light chain region of an antibody that binds a tumor antigen or a B cell antigen listed above.

[0380] In one embodiment, the antigen binding domain of a CAR, e.g., a TA CAR and/or a BCA CAR, described herein is a scFv antibody fragment. In one aspect, such antibody fragments are functional in that they retain the equivalent binding affinity, e.g., they bind the same antigen with comparable efficacy, as the IgG antibody from which it is derived. In other embodiments, the antibody fragment has a lower binding affinity, e.g., it binds the same antigen with a lower binding affinity than the antibody from which it is derived, but is functional in that it provides a biological response described herein. In one embodiment, the CAR molecule comprises an antibody fragment that has a binding affinity K_{D} of 10⁻⁴ M to 10⁻⁸ M, e.g., 10⁻⁵ M to 10⁻⁷ M, e.g., 10⁻⁶ M or 10⁻⁷ M, for the target antigen. In one embodiment, the antibody fragment has a binding affinity that is at least five-fold, 10-fold, 20-fold, 30-fold, 50-fold, 100-fold or 1,000-fold less than a reference antibody, e.g., an antibody described herein.

[0381] In one embodiment, the antigen binding domain comprises a non-human antibody or antibody fragment, e.g., a mouse antibody or antibody fragment.

[0382] In another embodiment, the antigen binding domain comprises a humanized antibody or an antibody fragment. In some aspects, a non-human antibody is humanized, where specific sequences or regions of the antibody are modified to increase similarity to an antibody naturally produced in a human or fragment thereof. In one aspect, the antigen binding domain is humanized compared to the murine sequence of the antibody or antibody fragment, e.g., scFv, from which it is derived.

[0383] A humanized antibody can be produced using a variety of techniques known in the art, including but not limited to, CDR-grafting (see, e.g., European Patent No. EP 239,400; International Publication No. WO 91/09967; and U.S. Pat. Nos. 5,225,539, 5,530,101, and 5,585,089, each of which is incorporated herein in its entirety by reference), veneering or resurfacing (see, e.g., European Patent Nos. EP 592,106 and EP 519,596; Padlan, 1991, Molecular Immunology, 28(4/5):489-498: Studnicka et al., 1994, Protein Engineering, 7(6):805-814; and Roguska et al., 1994, PNAS, 91:969-973, each of which is incorporated herein by its entirety by reference), chain shuffling (see, e.g., U.S. Pat. No. 5,565,332, which is incorporated herein in its entirety by reference), and techniques disclosed in, e.g., U.S. Patent Application Publication No. US2005/0042664, U.S. Patent Application Publication No. US2005/0048617, U.S. Pat. Nos. 6,407,213, 5,766,886, International Publication No. WO 9317105, Tan et al., J. Immunol., 169:1119-25 (2002), Caldas et al., Protein Eng., 13(5):353-60 (2000), Morea et al., Methods, 20(3):267-79 (2000), Baca et al., J. Biol. Chem., 272(16):10678-84 (1997), Roguska et al., Protein Eng., 9(10):895-904 (1996), Couto et al., Cancer Res., 55 (23 Supp): 5973s-5977s (1995), Couto et al., Cancer Res., 55(8): 1717-22 (1995), Sandhu J S, Gene, 150(2):409-10 (1994), and Pedersen et al., J. Mol. Biol., 235(3):959-73 (1994), each of which is incorporated herein in its entirety by reference. Often, framework residues in the framework regions will be substituted with the corresponding residue from the CDR donor antibody to alter, for example improve, antigen binding. These framework substitutions are identified by methods well-known in the art, e.g., by modeling of the interactions of the CDR and framework residues to identify framework residues important for antigen binding and sequence comparison to identify unusual framework residues at particular positions. (See, e.g., Queen et al., U.S. Pat. No. 5,585,089; and Riechmann et al., 1988, Nature, 332:323, which are incorporated herein by reference in their entireties.)

[0384] A humanized antibody or antibody fragment has one or more amino acid residues remaining in it from a source which is nonhuman. These nonhuman amino acid residues are often referred to as “import” residues, which are typically taken from an “import” variable domain. As provided herein, humanized antibodies or antibody fragments comprise one or more CDRs from nonhuman immunoglobulin molecules and framework regions wherein the amino acid residues comprising the framework are derived completely or mostly from human germline. Multiple techniques for humanization of antibodies or antibody fragments are well-known in the art and can essentially be performed following the method of Winter and co-workers (Jones et al., Nature, 321:522-525 (1986); Riechmann et al., Nature, 332:323-327 (1988); Verhoeyen et al., Science, 239:1534-1536 (1988)), by substituting rodent CDRs or CDR sequences for the corresponding sequences of a human antibody, i.e., CDR-grafting (EP 239,400; PCT Publication No. WO 91/09967; and U.S. Pat. Nos. 4,816,567; 6,331,415; 5,225,539; 5,530,101; 5,585,089; 6,548,640, the contents of which are incorporated herein by reference herein in their entirety). In such humanized antibodies and antibody fragments, substantially less than an intact human variable domain has been substituted by the corresponding sequence from a nonhuman species. Humanized antibodies are often human antibodies in which some CDR residues and possibly some framework (FR) residues are substituted by residues from analogous sites in rodent antibodies. Humanization of antibodies and antibody fragments can also be achieved by veneering or resurfacing (EP 592,106; EP 519,596; Padlan, 1991, Molecular Immunology, 28(4/5):489-498; Studnicka et al., Protein Engineering, 7(6):805-814 (1994); and Roguska et al., PNAS, 91:969-973 (1994)) or chain shuffling (U.S. Pat. No. 5,565,332), the contents of which are incorporated herein by reference herein in their entirety.

[0385] The choice of human variable domains, both light and heavy, to be used in making the humanized antibodies is to reduce antigenicity. According to the so-called “best-fit” method, the sequence of the variable domain of a rodent antibody is screened against the entire library of known human variable-domain sequences. The human sequence which is closest to that of the rodent is then accepted as the human framework (FR) for the humanized antibody (Sims et al., J. Immunol., 151:2296 (1993); Chothia et al., J. Mol. Biol., 196:901 (1987), the contents of which are incorporated herein by reference herein in their entirety). Another method uses a particular framework derived from the consensus sequence of all human antibodies of a particular subgroup of light or heavy chains. The same framework may be used for several different humanized antibodies (see, e.g., Nicholson et al. Mol. Immun. 34 (16-17): 1157-1165 (1997); Carter et al., Proc. Natl. Acad. Sci. USA, 89:4285 (1992); Presta et al., J. Immunol., 151:2623 (1993), the contents of which are incorporated herein by reference herein in their entirety). In some embodiments, the framework region, e.g., all four framework regions, of the heavy chain variable region are derived from a VH4_4-59 germline sequence. In one embodiment, the framework region can comprise, one, two, three, four or five modifications, e.g., substitutions, e.g., from the amino acid at the corresponding murine sequence. In one embodiment, the framework region, e.g., all four framework regions of the light chain variable region are derived from a VK3_1.25 germline sequence. In one embodiment, the framework region can comprise, one, two, three, four or five modifications, e.g., substitutions, e.g., from the amino acid at the corresponding murine sequence.

[0386] In some aspects, the portion of a CAR of the invention, e.g., a TA CAR and/or a BCA CAR described herein, that comprises an antibody fragment is humanized with retention of high affinity for the target antigen and other favorable biological properties. According to one aspect of the invention, humanized antibodies and antibody fragments are prepared by a process of analysis of the parental sequences and various conceptual humanized products using three-dimensional models of the parental and humanized sequences. Three-dimensional immunoglobulin models are commonly available and are familiar to those skilled in the art. Computer programs are available which illustrate and display probable three-dimensional conformational structures of selected candidate immunoglobulin sequences. Inspection of these displays permits analysis of the likely role of the residues in the functioning of the candidate immunoglobulin sequence, e.g., the analysis of residues that influence the ability of the candidate immunoglobulin to bind the target antigen. In this way, FR residues can be selected and combined from the recipient and import sequences so that the desired antibody or antibody fragment characteristic, such as increased affinity for the target antigen, is achieved. In general, the CDR residues are directly and most substantially involved in influencing antigen binding.

[0387] A humanized antibody or antibody fragment may retain a similar antigenic specificity as the original antibody, e.g., in the present disclosure, the ability to bind human a tumor antigen as described herein. In some embodiments, a humanized antibody or antibody fragment may have improved affinity and/or specificity of binding to a tumor antigen as described herein or a B cell antigen as described herein. In some embodiments, a humanized antibody or antibody fragment may have lower affinity and/or specificity of a tumor antigen as described herein or a B cell antigen as described herein.

[0388] In one aspect, the antigen binding domain of the invention is characterized by particular functional features or properties of an antibody or antibody fragment. For example, in one aspect, the portion of a CAR of the invention that comprises an antigen binding domain specifically binds a tumor antigen as described herein or a B cell antigen as described herein.

[0389] In one aspect, the antigen binding domain is a fragment, e.g., a single chain variable fragment (scFv). In one aspect, the anti-tumor antigen as described herein binding domain is a Fv, a Fab, a (Fab′)2, or a bi-functional (e.g. bi-specific) hybrid antibody (e.g., Lanzavecchia et al., Eur. J. Immunol. 17, 105 (1987)). In one aspect, the antibodies and fragments thereof of the invention binds a tumor antigen as described herein protein with wild-type or enhanced affinity.

[0390] In some instances, scFvs can be prepared according to method known in the art (see, for example, Bird et al., (1988) Science 242:423-426 and Huston et al., (1988) Proc. Natl. Acad. Sci. USA 85:5879-5883). ScFv molecules can be produced by linking VH and VL regions together using flexible polypeptide linkers. The scFv molecules comprise a linker (e.g., a Ser-Gly linker) with an optimized length and/or amino acid composition. The linker length can greatly affect how the variable regions of a scFv fold and interact. In fact, if a short polypeptide linker is employed (e.g., between 5-10 amino acids) intrachain folding is prevented. Interchain folding is also required to bring the two variable regions together to form a functional epitope binding site. For examples of linker orientation and size see, e.g., Hollinger et al. 1993 Proc Natl Acad. Sci. U.S.A. 90:6444-6448, U.S. Patent Application Publication Nos. 2005/0100543, 2005/0175606, 2007/0014794, and PCT publication Nos. WO2006/020258 and WO2007/024715, is incorporated herein by reference.

[0391] An scFv can comprise a linker of at least 1, 2, 3, 4, 5, 6, 7, 8, 9, 10, 11, 12, 13, 14, 15, 16, 17, 18, 19, 20, 25, 30, 35, 40, 45, 50, or more amino acid residues between its VL and VH regions. The linker sequence may comprise any naturally occurring amino acid. In some embodiments, the linker sequence comprises amino acids glycine and serine. In another embodiment, the linker sequence comprises sets of glycine and serine repeats such as (Gly₄Ser)n, where n is a positive integer equal to or greater than 1 (SEQ ID NO:22). In one embodiment, the linker can be (Gly₄Ser)₄ (SEQ ID NO:29) or (Gly₄Ser)₃(SEQ ID NO:30). Variation in the linker length may retain or enhance activity, giving rise to superior efficacy in activity studies.

[0392] In another aspect, the antigen binding domain is a T cell receptor (“TCR”), an engineered TCR, or a fragment thereof, for example, a single chain TCR (scTCR). Methods to make such TCRs are known in the art. See, e.g., Willemsen R A et al, Gene Therapy 7: 1369-1377 (2000); Zhang T et al, Cancer Gene Ther 11: 487-496 (2004); Aggen et al, Gene Ther. 19(4):365-74 (2012) (references are incorporated herein by its entirety). For example, scTCR can be engineered that contains the Vα and Vβ genes from a T cell clone linked by a linker (e.g., a flexible peptide). This approach is very useful to cancer associated target that itself is intracellular, however, a fragment of such antigen (peptide) is presented on the surface of the cancer cells by MHC.

[0393] In one aspect, the antigen binding domain of the CAR comprises an amino acid sequence that is homologous to an antigen binding domain amino acid sequence described herein, and the antigen binding domain retains the desired functional properties of the antigen binding domain described herein.

[0394] In one specific aspect, the CAR composition of the invention comprises an antibody fragment. In a further aspect, the antibody fragment comprises a scFv. In a further aspect, the antibody fragment comprises a variable heavy chain (VH) only.

[0395] In various aspects, the antigen binding domain of the CAR is engineered by modifying one or more amino acids within one or both variable regions (e.g., VH and/or VL), for example within one or more CDR regions and/or within one or more framework regions. In one specific aspect, the CAR composition of the invention comprises an antibody fragment. In a further aspect, the antibody fragment comprises an scFv.

[0396] It will be understood by one of ordinary skill in the art that the antibody or antibody fragment of the invention may further be modified such that they vary in amino acid sequence (e.g., from wild-type), but not in desired activity. For example, additional nucleotide substitutions leading to amino acid substitutions at “non-essential” amino acid residues may be made to the protein. For example, a nonessential amino acid residue in a molecule may be replaced with another amino acid residue from the same side chain family. In another embodiment, a string of amino acids can be replaced with a structurally similar string that differs in order and/or composition of side chain family members, e.g., a conservative substitution, in which an amino acid residue is replaced with an amino acid residue having a similar side chain, may be made.

[0397] Families of amino acid residues having similar side chains have been defined in the art, including basic side chains (e.g., lysine, arginine, histidine), acidic side chains (e.g., aspartic acid, glutamic acid), uncharged polar side chains (e.g., glycine, asparagine, glutamine, serine, threonine, tyrosine, cysteine), nonpolar side chains (e.g., alanine, valine, leucine, isoleucine, proline, phenylalanine, methionine, tryptophan), beta-branched side chains (e.g., threonine, valine, isoleucine) and aromatic side chains (e.g., tyrosine, phenylalanine, tryptophan, histidine).

[0398] Percent identity in the context of two or more nucleic acids or polypeptide sequences, refers to two or more sequences that are the same. Two sequences are “substantially identical” if two sequences have a specified percentage of amino acid residues or nucleotides that are the same (e.g., 600/o identity, optionally 70%, 71%, 72%, 73%, 74%, 75%, 76%, 77%, 78%, 79%, 80%, 81%, 82%, 83%, 84%, 85%, 86%, 87%, 88%, 89%, 90%, 91%, 92%, 93%, 94%, 95%, 96%, 97%, 98%, 99% identity over a specified region, or, when not specified, over the entire sequence), when compared and aligned for maximum correspondence over a comparison window, or designated region as measured using one of the following sequence comparison algorithms or by manual alignment and visual inspection. Optionally, the identity exists over a region that is at least about 50 nucleotides (or 10 amino acids) in length, or more preferably over a region that is 100 to 500 or 1000 or more nucleotides (or 20, 50, 200 or more amino acids) in length.

[0399] For sequence comparison, typically one sequence acts as a reference sequence, to which test sequences are compared. When using a sequence comparison algorithm, test and reference sequences are entered into a computer, subsequence coordinates are designated, if necessary, and sequence algorithm program parameters are designated. Default program parameters can be used, or alternative parameters can be designated. The sequence comparison algorithm then calculates the percent sequence identities for the test sequences relative to the reference sequence, based on the program parameters. Methods of alignment of sequences for comparison are well known in the art. Optimal alignment of sequences for comparison can be conducted, e.g., by the local homology algorithm of Smith and Waterman, (1970) Adv. Appl. Math. 2:482c, by the homology alignment algorithm of Needleman and Wunsch, (1970) J. Mol. Biol. 48:443, by the search for similarity method of Pearson and Lipman, (1988) Proc. Nat'l. Acad. Sci. USA 85:2444, by computerized implementations of these algorithms (GAP, BESTFIT, FASTA, and TFASTA in the Wisconsin Genetics Software Package, Genetics Computer Group, 575 Science Dr., Madison, Wis.), or by manual alignment and visual inspection (see, e.g., Brent et al., (2003) Current Protocols in Molecular Biology).

[0400] Two examples of algorithms that are suitable for determining percent sequence identity and sequence similarity are the BLAST and BLAST 2.0 algorithms, which are described in Altschul et al., (1977) Nuc. Acids Res. 25:3389-3402; and Altschul et al., (1990) J. Mol. Biol. 215:403-410, respectively. Software for performing BLAST analyses is publicly available through the National Center for Biotechnology Information.

[0401] The percent identity between two amino acid sequences can also be determined using the algorithm of E. Meyers and W. Miller, (1988) Comput. Appl. Biosci. 4:11-17) which has been incorporated into the ALIGN program (version 2.0), using a PAM120 weight residue table, a gap length penalty of 12 and a gap penalty of 4. In addition, the percent identity between two amino acid sequences can be determined using the Needleman and Wunsch (1970) J. Mol. Biol. 48:444-453) algorithm which has been incorporated into the GAP program in the GCG software package (available at www.gcg.com), using either a Blossom 62 matrix or a PAM250 matrix, and a gap weight of 16, 14, 12, 10, 8, 6, or 4 and a length weight of 1, 2, 3, 4, 5, or 6.

[0402] In one aspect, the present disclosure contemplates modifications of the starting antibody or fragment (e.g., scFv) amino acid sequence that generate functionally equivalent molecules. For example, the VH or VL of an antigen binding domain to—a tumor antigen described herein, e.g., scFv, comprised in the CAR can be modified to retain at least about 70%, 71%. 72%. 73%, 74%, 75%, 76%, 77%, 78%, 79%, 80%, 81%, 82%, 83%, 84%, 85%, 86%, 87%, 88%, 89%, 90%, 91%, 92%, 93%, 94%, 95%, 96%, 97%, 98%, 99% identity of the starting VH or VL framework region of the antigen binding domain to the tumor antigen described herein, e.g., scFv. The present disclosure contemplates modifications of the entire CAR construct, e.g., modifications in one or more amino acid sequences of the various domains of the CAR construct in order to generate functionally equivalent molecules. The CAR construct can be modified to retain at least about 70%, 71%. 72%. 73%, 74%, 75%, 76%, 77%, 78%, 79%, 80%, 81%, 82%, 83%, 84%, 85%, 86%, 87%, 88%, 89%, 90%, 91%, 92%, 93%, 94%, 95%, 96%, 97%, 98%, 99% identity of the starting CAR construct.

### Bispecific CARs

[0403] In an embodiment a multispecific antibody molecule is a bispecific antibody molecule. A bispecific antibody has specificity for no more than two antigens. A bispecific antibody molecule is characterized by a first immunoglobulin variable domain sequence which has binding specificity for a first epitope and a second immunoglobulin variable domain sequence that has binding specificity for a second epitope. In an embodiment the first and second epitopes are on the same antigen, e.g., the same protein (or subunit of a multimeric protein). In an embodiment the first and second epitopes overlap. In an embodiment the first and second epitopes do not overlap. In an embodiment the first and second epitopes are on different antigens, e.g., different proteins (or different subunits of a multimeric protein). In an embodiment a bispecific antibody molecule comprises a heavy chain variable domain sequence and a light chain variable domain sequence which have binding specificity for a first epitope and a heavy chain variable domain sequence and a light chain variable domain sequence which have binding specificity for a second epitope. In an embodiment a bispecific antibody molecule comprises a half antibody having binding specificity for a first epitope and a half antibody having binding specificity for a second epitope. In an embodiment a bispecific antibody molecule comprises a half antibody, or fragment thereof, having binding specificity for a first epitope and a half antibody, or fragment thereof, having binding specificity for a second epitope. In an embodiment a bispecific antibody molecule comprises a scFv, or fragment thereof, have binding specificity for a first epitope and a scFv, or fragment thereof, have binding specificity for a second epitope.

[0404] In certain embodiments, the antibody molecule is a multi-specific (e.g., a bispecific or a trispecific) antibody molecule. Protocols for generating bispecific or heterodimeric antibody molecules are known in the art; including but not limited to, for example, the “knob in a hole” approach described in, e.g., U.S. Pat. No. 5,731,168; the electrostatic steering Fc pairing as described in, e.g., WO 09/089004, WO 06/106905 and WO 2010/129304; Strand Exchange Engineered Domains (SEED) heterodimer formation as described in, e.g., WO 07/110205; Fab arm exchange as described in, e.g., WO 08/119353, WO 2011/131746, and WO 2013/060867; double antibody conjugate, e.g., by antibody cross-linking to generate a bi-specific structure using a heterobifunctional reagent having an amine-reactive group and a sulfhydryl reactive group as described in, e.g., U.S. Pat. No. 4,433,059; bispecific antibody determinants generated by recombining half antibodies (heavy-light chain pairs or Fabs) from different antibodies through cycle of reduction and oxidation of disulfide bonds between the two heavy chains, as described in, e.g., U.S. Pat. No. 4,444,878; trifunctional antibodies, e.g., three Fab′ fragments cross-linked through sulfhydryl reactive groups, as described in, e.g., U.S. Pat. No. 5,273,743; biosynthetic binding proteins, e.g., pair of scFvs cross-linked through C-terminal tails preferably through disulfide or amine-reactive chemical cross-linking, as described in, e.g., U.S. Pat. No. 5,534,254; bifunctional antibodies, e.g., Fab fragments with different binding specificities dimerized through leucine zippers (e.g., c-fos and c-jun) that have replaced the constant domain, as described in, e.g., U.S. Pat. No. 5,582,996; bispecific and oligospecific mono- and oligovalent receptors, e.g., VH-CHI regions of two antibodies (two Fab fragments) linked through a polypeptide spacer between the CHI region of one antibody and the VH region of the other antibody typically with associated light chains, as described in, e.g., U.S. Pat. No. 5,591,828; bispecific DNA-antibody conjugates, e.g., crosslinking of antibodies or Fab fragments through a double stranded piece of DNA, as described in, e.g., U.S. Pat. No. 5,635,602; bispecific fusion proteins, e.g., an expression construct containing two scFvs with a hydrophilic helical peptide linker between them and a full constant region, as described in, e.g., U.S. Pat. No. 5,637,481; multivalent and multispecific binding proteins, e.g., dimer of polypeptides having first domain with binding region of Ig heavy chain variable region, and second domain with binding region of Ig light chain variable region, generally termed diabodies (higher order structures are also encompassed creating for bispecifc, trispecific, or tetraspecific molecules, as described in, e.g., U.S. Pat. No. 5,837,242; minibody constructs with linked VL and VH chains further connected with peptide spacers to an antibody hinge region and CH3 region, which can be dimerized to form bispecific/multivalent molecules, as described in, e.g., U.S. Pat. No. 5,837,821; VH and VL domains linked with a short peptide linker (e.g., 5 or 10 amino acids) or no linker at all in either orientation, which can form dimers to form bispecific diabodies; trimers and tetramers, as described in, e.g., U.S. Pat. No. 5,844,094; String of VH domains (or VL domains in family members) connected by peptide linkages with crosslinkable groups at the C-terminus further associated with VL domains to form a series of FVs (or scFvs), as described in, e.g., U.S. Pat. No. 5,864,019; and single chain binding polypeptides with both a VH and a VL domain linked through a peptide linker are combined into multivalent structures through non-covalent or chemical crosslinking to form, e.g., homobivalent, heterobivalent, trivalent, and tetravalent structures using both scFV or diabody type format, as described in, e.g., U.S. Pat. No. 5,869,620. Additional exemplary multispecific and bispecific molecules and methods of making the same are found, for example, in U.S. Pat. Nos. 5,910,573, 5,932,448, 5,959,083, 5,989,830, 6,005,079, 6,239,259, 6,294,353, 6,333,396, 6,476,198, 6,511,663, 6,670,453, 6,743,896, 6,809,185, 6,833,441, 7,129,330, 7,183,076, 7,521,056, 7,527,787, 7,534,866, 7,612,181, US2002004587A1, US2002076406A1, US2002103345A1, US2003207346A1, US2003211078A1, US2004219643A1, US2004220388A1, US2004242847A1, US2005003403A1, US2005004352A1, US2005069552A1, US2005079170A1, US2005100543 A1, US2005136049A1, US2005136051 A1, US2005163782A1, US2005266425A1, US2006083747A1, US2006120960A1, US2006204493A1, US2006263367A1, US2007004909A1, US2007087381A1, US2007128150A1, US2007141049A1, US2007154901A1, US2007274985A1, US2008050370A1, US2008069820A1, US2008152645A1, US2008171855A1, US2008241884A1, US2008254512A1, US2008260738A1, US2009130106A1, US2009148905A1, US2009155275A1, US2009162359A1, US2009162360A1, US2009175851A1, US2009175867A1, US2009232811A1, US2009234105A1, US2009263392A1, US2009274649A1, EP346087A2, WO006605A2, WO02072635A2, WO04081051A1, WO06020258A2, WO2007044887A2, WO2007095338A2, WO2007137760A2, WO2008119353A1, WO2009021754A2, WO2009068630A1, WO9103493A1, WO9323537A1, WO9409131A1, WO9412625A2, WO9509917A1, WO9637621A2, WO9964460A1. The contents of the above-referenced applications are incorporated herein by reference in their entireties.

[0405] Within each antibody or antibody fragment (e.g., scFv) of a bispecific antibody molecule, the VH can be upstream or downstream of the VL. In some embodiments, the upstream antibody or antibody fragment (e.g., scFv) is arranged with its VH (VH₁) upstream of its VL (VL₁) and the downstream antibody or antibody fragment (e.g., scFv) is arranged with its VL (VL₂) upstream of its VH (VH₂), such that the overall bispecific antibody molecule has the arrangement VH₁-VL₁-VL₂-VH₂. In other embodiments, the upstream antibody or antibody fragment (e.g., scFv) is arranged with its VL (VL₁) upstream of its VH (VH₁) and the downstream antibody or antibody fragment (e.g., scFv) is arranged with its VH (VH₂) upstream of its VL (VL₂), such that the overall bispecific antibody molecule has the arrangement VL₁-VH₁-VH₂-VL₂. Optionally, a linker is disposed between the two antibodies or antibody fragments (e.g., scFvs), e.g., between VL₁ and VL₂ if the construct is arranged as VH₁-VL₁-VL₂-VH₂, or between VH₁ and VH₂ if the construct is arranged as VL₁-VH₁-VH₂-VL₂. The linker may be a linker as described herein, e.g., a (Gly₄-Ser)n linker, wherein n is 1, 2, 3, 4, 5, or 6, preferably 4 (SEQ ID NO: 80). In general, the linker between the two scFvs should be long enough to avoid mispairing between the domains of the two scFvs. Optionally, a linker is disposed between the VL and VH of the first scFv. Optionally, a linker is disposed between the VL and VH of the second scFv. In constructs that have multiple linkers, any two or more of the linkers can be the same or different. Accordingly, in some embodiments, a bispecific CAR comprises VLs, VHs, and optionally one or more linkers in an arrangement as described herein.

[0406] In one aspect, the invention provides a chimeric antigen receptor comprising a bispecific antigen binding domain, a transmembrane domain (e.g., as described herein), and an intracellular signaling domain (e.g., as described herein). In embodiments, the bispecific antigen binding domain comprises a first immunoglobulin variable domain sequence, e.g., an scFv (or comprises the light chain CDRs and/or heavy chain CDRs from a scFv described herein), which binds a B-cell antigen, e.g., as described herein, e.g., (a CD19 binding domain or BCMA binding domain described herein, e.g., in Table 6 or Table 12), and a second immunoglobulin variable domain sequence, e.g., a scFv (or comprises the light chain CDRs and/or heavy chain CDRs from a scFv described herein), which has binding specificity for one or more tumor antigens described herein, e.g., a solid tumor antigen, e.g., comprises a scFv as described herein, e.g., comprising a mesothelin binding domain or EGFRvIII binding domain (e.g., as described in Table 2 or Table 5). In embodiments, the bispecific antigen binding domain comprises a CD19 binding domain described herein and a mesothelin binding domain described herein. In embodiments, the bispecific antigen binding domain comprises a BCMA binding domain described herein and a mesothelin binding domain described herein. In embodiments, the bispecific antigen binding domain comprises a CD19 binding domain described herein and a EGFRvIII binding domain described herein. In embodiments, the bispecific antigen binding domain comprises a BCMA binding domain described herein and a EGFRvII binding domain described herein. In another aspect, the invention provides a cell (e.g., a population of cells), e.g., an immune effector cell, e.g., a T cell or NK cell, e.g., as described herein, which is engineered to express (e.g., comprises) a bispecific CAR as described herein, e.g., a bispecific CAR comprising a B-cell antigen binding domain described herein and a tumor antigen (e.g., a solid tumor antigen) described herein. Without being bound by any theory, it is believed that cells expressing such bispecific CARs (e.g., comprising a B-cell antigen binding domain, e.g., as described herein, and a tumor antigen binding domain, e.g., as described herein) are useful in the methods and compositions described herein.

### Chimeric TCR

[0407] In one aspect, the antigen binding domains described herein, e.g., the antibodies and antibody fragments, e.g., provided in the Tables herein, can be grafted to one or more constant domain of a T cell receptor (“TCR”) chain, for example, a TCR alpha or TCR beta chain, to create an chimeric TCR that binds specificity to a tumor antigen or B cell antigendescribed herein. Without being bound by theory, it is believed that chimeric TCRs will signal through the TCR complex upon antigen binding. For example, a mesothelin or CD19 scFv or a fragment there of, e.g., a VL domain, or VH domain, as disclosed herein, can be grafted to the constant domain, e.g., at least a portion of the extracellular constant domain, the transmembrane domain and the cytoplasmic domain, of a TCR chain, for example, the TCR alpha chain and/or the TCR beta chain. As another example, the CDRs of an antibody or antibody fragment, e.g., the CDRs of anyantibody or antibody fragment as described in Tables provided herein may be grafted into a TCR alpha and/or beta chain to create a chimeric TCR that binds specifically to a tumor antigen or a B cell antigen described herein. For example, the LCDRs disclosed herein may be grafted into the variable domain of a TCR alpha chain and the HCDRs disclosed herein may be grafted to the variable domain of a TCR beta chain, or vice versa. Such chimeric TCRs may be produced by methods known in the art (For example, Willemsen R A et al, Gene Therapy 2000; 7: 1369-1377; Zhang T et al, Cancer Gene Ther 2004; 11: 487-496; Aggen et al, Gene Ther. 2012 Apr.; 19(4):365-74).

### Transmembrane Domain

[0408] With respect to the transmembrane domain, in various embodiments, a CAR, e.g., a TA CAR and/or a BCA CAR, can be designed to comprise a transmembrane domain that is attached to the extracellular domain of the CAR, e.g., the antigen binding domain. A transmembrane domain can include one or more additional amino acids adjacent to the transmembrane region, e.g., one or more amino acid associated with the extracellular region of the protein from which the transmembrane was derived (e.g., 1, 2, 3, 4, 5, 6, 7, 8, 9, 10 up to 15 amino acids of the extracellular region) and/or one or more additional amino acids associated with the intracellular region of the protein from which the transmembrane protein is derived (e.g., 1, 2, 3, 4, 5, 6, 7, 8, 9, 10 up to 15 amino acids of the intracellular region). In one aspect, the transmembrane domain is one that is associated with one of the other domains of the CAR, for example, the transmembrane domain is from the same protein as the intracellular signalling domain, e.g., the costimulatory domain. In some instances, the transmembrane domain can be selected or modified by amino acid substitution to avoid binding of such domains to the transmembrane domains of the same or different surface membrane proteins, e.g., to minimize interactions with other members of the receptor complex. In one aspect, the transmembrane domain is capable of homodimerization with another CAR on the cell surface of a CAR-expressing cell. In a different aspect, the amino acid sequence of the transmembrane domain may be modified or substituted so as to minimize interactions with the binding domains of the native binding partner present in the same CAR-expressing cell.

[0409] The transmembrane domain may be derived either from a natural or from a recombinant source. Where the source is natural, the domain may be derived from any membrane-bound or transmembrane protein. In one aspect the transmembrane domain is capable of signaling to the intracellular domain(s) whenever the CAR has bound to a target. A transmembrane domain of particular use in this invention may include at least the transmembrane region(s) of e.g., the alpha, beta or zeta chain of the T-cell receptor, CD28, CD27, CD3 epsilon, CD45, CD4, CD5, CD8, CD9, CD16, CD22, CD33, CD37, CD64, CD80, CD86, CD134, CD137, CD154. In some embodiments, a transmembrane domain may include at least the transmembrane region(s) of, e.g., KIRDS2, OX40, CD2, CD27, LFA-1 (CD11a, CD18), ICOS (CD278), 4-1BB (CD137), GITR, CD40, BAFFR, HVEM (LIGHTR), SLAMF7, NKp80 (KLRF1), NKp44, NKp30, NKp46, CD160, CD19, IL2R beta, IL2R gamma, IL7R α, ITGA1, VLA, CD49a, ITGA4, IA4, CD49D, ITGA6, VLA-6, CD49f, ITGAD, CD11d, ITGAE, CD103, ITGAL, CD11a, LFA-1, ITGAM, CD11b, ITGAX, CD11c, ITGB1, CD29, ITGB2, CD18, LFA-1, ITGB7, TNFR2, DNAM1 (CD226), SLAMF4 (CD244, 2B4), CD84, CD96 (Tactile), CEACAM1, CRTAM, Ly9 (CD229), CD160 (BY55), PSGL1, CD100 (SEMA4D), SLAMF6 (NTB-A, Ly108), SLAM (SLAMF1, CD150, IPO-3), BLAME (SLAMF8), SELPLG (CD162), LTBR, PAG/Cbp, NKG2D, NKG2C.

[0410] In some instances, the transmembrane domain can be attached to the extracellular region of the CAR, e.g., the antigen binding domain of the CAR, via a hinge, e.g., a hinge from a human protein. For example, in one embodiment, the hinge can be a human Ig (immunoglobulin) hinge, e.g., an IgG4 hinge, or a CD8a hinge. In one embodiment, the hinge or spacer comprises (e.g., consists of) the amino acid sequence of SEQ ID NO:4. In one aspect, the transmembrane domain comprises (e.g., consists of) a transmembrane domain of SEQ ID NO: 12.

[0411] In one aspect, the hinge or spacer comprises an IgG4 hinge. For example, in one embodiment, the hinge or spacer comprises a hinge of the amino acid sequence SEQ ID NO: 6.

[0412] In some embodiments, the hinge or spacer comprises a hinge encoded by a nucleotide sequence of SEQ ID NO: 7. In one aspect, the hinge or spacer comprises an IgD hinge. For example, in one embodiment, the hinge or spacer comprises a hinge of the amino acid sequence SEQ ID NO: 8. In some embodiments, the hinge or spacer comprises a hinge encoded by a nucleotide sequence of SEQ ID NO: 9.

[0413] In one aspect, the transmembrane domain may be recombinant, in which case it will comprise predominantly hydrophobic residues such as leucine and valine. In one aspect a triplet of phenylalanine, tryptophan and valine can be found at each end of a recombinant transmembrane domain.

[0414] Optionally, a short oligo- or polypeptide linker, between 2 and 10 amino acids in length may form the linkage between the transmembrane domain and the cytoplasmic region of the CAR A glycine-serine doublet provides a particularly suitable linker. For example, in one aspect, the linker comprises the amino acid sequence of GGGGSGGGGS (SEQ ID NO: 10). In some embodiments, the linker is encoded by a nucleotide sequence of GGTGGCGGAGGTCTGGAGGTGGAGGTTCC (SEQ ID NO: 11).

[0415] In one aspect, the hinge or spacer comprises a KIR2DS2 hinge.

### Cytoplasmic Domain

[0416] The cytoplasmic domain or region of the CAR, e.g., the TA CAR and/or the BCA CAR, includes an intracellular signaling domain. An intracellular signaling domain is generally responsible for activation of at least one of the normal effector functions of the immune cell in which the CAR has been introduced. The term “effector function” refers to a specialized function of a cell. Effector function of a T cell, for example, may be cytolytic activity or helper activity including the secretion of cytokines. Thus the term “intracellular signaling domain” refers to the portion of a protein which transduces the effector function signal and directs the cell to perform a specialized function. While usually the entire intracellular signaling domain can be employed, in many cases it is not necessary to use the entire chain. To the extent that a truncated portion of the intracellular signaling domain is used, such truncated portion may be used in place of the intact chain as long as it transduces the effector function signal. The term intracellular signaling domain is thus meant to include any truncated portion of the intracellular signaling domain sufficient to transduce the effector function signal.

[0417] Examples of intracellular signaling domains for use in the CAR of the invention include the cytoplasmic sequences of the T cell receptor (TCR) and co-receptors that act in concert to initiate signal transduction following antigen receptor engagement, as well as any derivative or variant of these sequences and any recombinant sequence that has the same functional capability.

[0418] It is known that signals generated through the TCR alone are insufficient for full activation of the T cell and that a secondary and/or costimulatory signal is also required. Thus, T cell activation can be said to be mediated by two distinct classes of cytoplasmic signaling sequences: those that initiate antigen-dependent primary activation through the TCR (primary intracellular signaling domains) and those that act in an antigen-independent manner to provide a secondary or costimulatory signal (secondary cytoplasmic domain, e.g., a costimulatory domain).

[0419] A primary signaling domain regulates primary activation of the TCR complex either in a stimulatory way, or in an inhibitory way. Primary intracellular signaling domains that act in a stimulatory manner may contain signaling motifs which are known as immunoreceptor tyrosine-based activation motifs or ITAMs.

[0420] Examples of ITAM containing primary intracellular signaling domains that are of particular use in the invention include those of TCR zeta, FcR gamma, FcR beta, CD3 gamma, CD3 delta, CD3 epsilon, CD5, CD22, CD79a, CD79b, CD278 (also known as “ICOS”), FcεRI, DAP10, DAP12, and CD66d. In one embodiment, a CAR of the invention comprises an intracellular signaling domain, e.g., a primary signaling domain of CD3-zeta, e.g., a CD3-zeta sequence described herein.

[0421] In one embodiment, a primary signaling domain comprises a modified ITAM domain, e.g., a mutated ITAM domain which has altered (e.g., increased or decreased) activity as compared to the native ITAM domain. In one embodiment, a primary signaling domain comprises a modified ITAM-containing primary intracellular signaling domain, e.g., an optimized and/or truncated ITAM-containing primary intracellular signaling domain. In an embodiment, a primary signaling domain comprises one, two, three, four or more ITAM motifs.

[0422] The intracellular signaling domain of the CAR can comprise the CD3-zeta signaling domain by itself or it can be combined with any other desired intracellular signaling domain(s) useful in the context of a CAR of the invention. For example, the intracellular signaling domain of the CAR can comprise a CD3 zeta chain portion and a costimulatory signaling domain. The costimulatory signaling domain refers to a portion of the CAR comprising the intracellular domain of a costimulatory molecule. A costimulatory molecule is a cell surface molecule other than an antigen receptor or its ligands that is required for an efficient response of lymphocytes to an antigen. Examples of such molecules include CD27, CD28, 4-1BB (CD137), OX40, CD30, CD40, PD-1, ICOS, lymphocyte function-associated antigen-1 (LFA-1), CD2, CD7, LIGHT, NKG2C, B7-H3, and a ligand that specifically binds with CD83, and the like. For example, CD27 costimulation has been demonstrated to enhance expansion, effector function, and survival of human CART cells in vitro and augments human T cell persistence and antitumor activity in vivo (Song et al. Blood. 2012; 119(3):696-706). Further examples of such costimulatory molecules include an MHC class I molecule, a TNF receptor protein, an Immunoglobulin-like protein, a cytokine receptor, an integrin, a signaling lymphocytic activation molecule (SLAM protein), an activating NK cell receptor, BTLA, a Toll ligand receptor, OX40, CD2, CD7, CD27, CD28, CD30, CD40, CDS, ICAM-1, LFA-1 (CD11a/CD18), 4-1BB (CD137), B7-H3, CDS, ICAM-1, ICOS (CD278), GITR, BAFFR, LIGHT, HVEM (LIGHTR), KIRDS2, SLAMF7, NKp80 (KLRF1), NKp44, NKp30, NKp46, CD19, CD4, CD8alpha, CD8beta, IL2R beta, IL2R gamma, IL7R alpha, ITGA4, VLA1, CD49a, ITGA4, IA4, CD49D, ITGA6, VLA-6, CD49f, ITGAD, CD11d, ITGAE, CD103, ITGAL, CD11a, LFA-1, ITGAM, CD11b, ITGAX, CD11c, ITGB1, CD29, ITGB2, CD18, LFA-1, ITGB7, NKG2D, NKG2C, TNFR2, TRANCE/RANKL, DNAM1 (CD226), SLAMF4 (CD244, 2B4), CD84, CD96 (Tactile), CEACAM1, CRTAM, Ly9 (CD229), CD160 (BY55), PSGL1, CD100 (SEMA4D), CD69, SLAMF6 (NTB-A, Ly108), SLAM (SLAMF1, CD150, IPO-3), BLAME (SLAMF8), SELPLG (CD162), LTBR, LAT, GADS, SLP-76, PAG/Cbp, CD19a, and a ligand that specifically binds with CD83.

[0423] The intracellular signaling sequences within the cytoplasmic portion of the CAR of the invention may be linked to each other in a random or specified order. Optionally, a short oligo- or polypeptide linker, for example, between 2 and 10 amino acids (e.g., 2, 3, 4, 5, 6, 7, 8, 9, or amino acids) in length may form the linkage between intracellular signaling sequence. In one embodiment, a glycine-serine doublet can be used as a suitable linker. In one embodiment, a single amino acid, e.g., an alanine, a glycine, can be used as a suitable linker.

[0424] In one aspect, the intracellular signaling domain is designed to comprise two or more, e.g., 2, 3, 4, 5, or more, costimulatory signaling domains. In an embodiment, the two or more, e.g., 2, 3, 4, 5, or more, costimulatory signaling domains, are separated by a linker molecule, e.g., a linker molecule described herein. In one embodiment, the intracellular signaling domain comprises two costimulatory signaling domains. In some embodiments, the linker molecule is a glycine residue. In some embodiments, the linker is an alanine residue.

[0425] In one aspect, the intracellular signaling domain is designed to comprise the signaling domain of CD3-zeta and the signaling domain of CD28. In one aspect, the intracellular signaling domain is designed to comprise the signaling domain of CD3-zeta and the signaling domain of 4-1BB. In one aspect, the signaling domain of 4-1BB is a signaling domain of SEQ ID NO: 14. In one aspect, the signaling domain of CD3-zeta is a signaling domain of SEQ ID NO: 18.

[0426] In one aspect, the intracellular signaling domain is designed to comprise the signaling domain of CD3-zeta and the signaling domain of CD27. In one aspect, the signaling domain of CD27 comprises an amino acid sequence of SEQ ID NO: 16. In one aspect, the signalling domain of CD27 is encoded by a nucleic acid sequence of SEQ ID NO: 17.

[0427] In one aspect, the intracellular is designed to comprise the signaling domain of CD3-zeta and the signaling domain of CD28. In one aspect, the signaling domain of CD28 comprises an amino acid sequence of SEQ ID NO: 44. In one aspect, the signaling domain of CD28 is encoded by a nucleic acid sequence of SEQ ID NO: 45.

[0428] In one aspect, the intracellular is designed to comprise the signaling domain of CD3-zeta and the signaling domain of ICOS. In one aspect, the signaling domain of ICOS comprises an amino acid sequence of SEQ ID NO: 42. In one aspect, the signaling domain of ICOS is encoded by a nucleic acid sequence of SEQ ID NO: 43.

[0429] In one aspect, the cell of the invention, e.g., described herein, e.g., a cell expressing both a TA CAR and a BCA CAR, includes a TA CAR that includes an antigen binding domain that binds a target tumor antigen described herein, a transmembrane domain, a primary signaling domain, and a costimulatory signaling domain, and a BCA CAR that includes an antigen binding domain that binds a target B-Cell antigen described herein, a transmembrane domain, a primary signaling domain, and a costimulatory signaling domain. In other aspects, the cell of the invention, e.g., described herein, e.g., a cell expressing both a TA CAR and a BCA CAR, includes a TA CAR that includes an antigen binding domain that binds a target tumor antigen described herein, a transmembrane domain, a primary signaling domain, and a costimulatory signaling domain, and a BCA CAR that includes an antigen binding domain that binds a target B-Cell antigen described herein, a transmembrane domain, and a costimulatory signaling domain, but does not include a primary signaling domain. Without being bound by theory, it is believed that providing a BCA CAR comprising a costimulatory signaling domain, but not a primary signaling domain, may allow the cell of the invention to persist and or proliferate in response to circulating B cells, but may minimize the cytotoxicity against said B cells.

[0430] In one aspect, the CAR-expressing cell described herein, e.g. a cell expressing both a TA CAR and a BCA CAR can further comprise another TA CAR, e.g., another TA CAR that includes a different antigen binding domain, e.g., to the same target or a different target (e.g., a target other than a tumor antigen described herein or a different tumor antigen described herein). For example, in an embodiment where the cell of the invention expresses a second TA CAR, the second TA CAR includes an antigen binding domain to a target expressed the same cancer cell type as the tumor antigen targeted by the first TA CAR. In one embodiment, the CAR-expressing cell comprises a first TA CAR that targets a first tumor antigen and includes an intracellular signaling domain having a costimulatory signaling domain but not a primary signaling domain, and a second TA CAR that targets a second, different, tumor antigen and includes an intracellular signaling domain having a primary signaling domain but not a costimulatory signaling domain. While not wishing to be bound by theory, placement of a costimulatory signaling domain, e.g., 4-1BB, CD28, CD27 or OX-40, onto the first TA CAR, and the primary signaling domain, e.g., CD3 zeta, on the second TA CAR can limit the CAR activity to cells where both targets are expressed. In one embodiment, the cell of the invention comprises a first tumor antigen (TA) CAR that includes an antigen binding domain that binds a target antigen described herein, a transmembrane domain and a costimulatory domain and a second TA CAR that targets a different target antigen (e.g., an antigen expressed on that same cancer cell type as the first target antigen) and includes an antigen binding domain, a transmembrane domain and a primary signaling domain. In another embodiment, the cell of the invention comprises (i.e., is genetically engineered to express) a first TA CAR that includes an antigen binding domain that binds a target antigen described herein, a transmembrane domain and a primary signaling domain and a second TA CAR that targets a tumor antigen other than the first target antigen (e.g., an antigen expressed on the same cancer cell type as the first target antigen) and includes an antigen binding domain to the antigen, a transmembrane domain and a costimulatory signaling domain. In another embodiment, the cell of the invention comprises (i.e., is genetically engineered to express) a first TA CAR that includes an antigen binding domain that binds a target antigen described herein, a transmembrane domain, a costimulatory signaling domain and a primary signaling domain, and a second TA CAR that targets a tumor antigen other than the first target antigen (e.g., an antigen expressed on the same cancer cell type as the first target antigen) and includes an antigen binding domain to the antigen, a transmembrane domain, a costimulatory signaling domain and a primary signaling domain. In embodiments where both the first and second TA CAR include a costimulatory signaling domain, the costimulatory signaling domain of the first TA CAR and the second TA CAR may be derived from the same protein, e.g., from a costimulatory protein described herein, e.g., 4-1BB, CD28, or ICOS. In other embodiments, the costimulatory signaling domain of the first TA CAR and the second TA CAR may be derived from the different proteins, e.g., the first TA CAR includes a costimulatory signaling domain described herein, e.g., of 4-1BB, and the second TA CAR includes a different costimulatory signaling domain described herein, e.g., of CD28.

[0431] In one embodiment, the CAR-expressing cell comprises a TA CAR described herein, a BCA CAR described herein, and an inhibitory CAR. In one embodiment, the inhibitory CAR comprises an antigen binding domain that binds an antigen found on normal cells but not cancer cells, e.g., normal cells that also express the tumor antigen targeted by the TA CAR In one embodiment, the inhibitory CAR comprises the antigen binding domain, a transmembrane domain and an intracellular domain of an inhibitory molecule. For example, the intracellular domain of the inhibitory CAR can be an intracellular domain of PD1, PD-L1, CTLA4, TIM3, LAG3, VISTA, BTLA, TIGIT, LAIR1, CD160, 2B4, CD80, CD86, B7-H3 (CD276), B7-H4 (VTCN1), HVEM (TNFRSF14 or CD270), KIR, A2aR, MHC class I, MHC class II, GAL9, adenosine, or TGF beta.

[0432] In one embodiment, the antigen binding domains of the different CARs (e.g., of the TA CAR and of the BCA CAR) can be such that the antigen binding domains do not interact with one another. For example, a cell expressing a first and second CAR can have an antigen binding domain of the first CAR, e.g., as a fragment, e.g., an scFv, that does not form an association with the antigen binding domain of the second CAR, e.g., the antigen binding domain of the second CAR is a VHH.

[0433] In some embodiments, the antigen binding domain comprises a single domain antigen binding (SDAB) molecules include molecules whose complementary determining regions are part of a single domain polypeptide. Examples include, but are not limited to, heavy chain variable domains, binding molecules naturally devoid of light chains, single domains derived from conventional 4-chain antibodies, engineered domains and single domain scaffolds other than those derived from antibodies. SDAB molecules may be any of the art, or any future single domain molecules. SDAB molecules may be derived from any species including, but not limited to mouse, human, camel, llama, lamprey, fish, shark, goat, rabbit, and bovine. This term also includes naturally occurring single domain antibody molecules from species other than Camelidae and sharks.

[0434] In one aspect, an SDAB molecule can be derived from a variable region of the immunoglobulin found in fish, such as, for example, that which is derived from the immunoglobulin isotype known as Novel Antigen Receptor (NAR) found in the serum of shark. Methods of producing single domain molecules derived from a variable region of NAR (“IgNARs”) are described in WO 03/014161 and Streltsov (2005) Protein Sci. 14:2901-2909.

[0435] According to another aspect, an SDAB molecule is a naturally occurring single domain antigen binding molecule known as heavy chain devoid of light chains. Such single domain molecules are disclosed in WO 9404678 and Hamers-Casterman, C. et al. (1993) Nature 363:446-448, for example. For clarity reasons, this variable domain derived from a heavy chain molecule naturally devoid of light chain is known herein as a VHH or nanobody to distinguish it from the conventional VH of four chain immunoglobulins. Such a VHH molecule can be derived from Camelidae species, for example in camel, llama, dromedary, alpaca and guanaco. Other species besides Camelidae may produce heavy chain molecules naturally devoid of light chain; such VHHs are within the scope of the invention.

[0436] The SDAB molecules can be recombinant, CDR-grafted, humanized, camelized, de-immunized and/or in vitro generated (e.g., selected by phage display).

[0437] It has also been discovered, that cells having a plurality of chimeric membrane embedded receptors comprising an antigen binding domain that interactions between the antigen binding domain of the receptors can be undesirable, e.g., because it inhibits the ability of one or more of the antigen binding domains to bind its cognate antigen. Accordingly, disclosed herein are cells having a first and a second non-naturally occurring chimeric membrane embedded receptor comprising antigen binding domains that minimize such interactions. Also disclosed herein are nucleic acids encoding a first and a second non-naturally occurring chimeric membrane embedded receptor comprising a antigen binding domains that minimize such interactions, as well as methods of making and using such cells and nucleic acids. In an embodiment the antigen binding domain of one of said first said second non-naturally occurring chimeric membrane embedded receptor, comprises an scFv, and the other comprises a single VH domain, e.g., a camelid, shark, or lamprey single VH domain, or a single VH domain derived from a human or mouse sequence.

[0438] In some embodiments, the claimed invention comprises a first and second CAR (e.g., a TA CAR and a BCA CAR), wherein the antigen binding domain of one of the first CAR and the second CAR does not comprise a variable light domain and a variable heavy domain. In some embodiments, the antigen binding domain of one of the first CAR and the second CAR is an scFv, and the other is not an scFv. In some embodiments, the antigen binding domain of one of the first CAR and the second CAR comprises a single VH domain, e.g., a camelid, shark, or lamprey single VH domain, or a single VH domain derived from a human or mouse sequence. In some embodiments, the antigen binding domain of one of the first CAR and the second CAR comprises a nanobody. In some embodiments, the antigen binding domain of one of the first CAR and the second CAR comprises a camelid VHH domain.

[0439] In some embodiments, the antigen binding domain of one of the first CAR and the second CAR comprises an scFv, and the other comprises a single VH domain, e.g., a camelid, shark, or lamprey single VH domain, or a single VH domain derived from a human or mouse sequence. In some embodiments, the antigen binding domain of one of the first CAR and the second CAR comprises an scFv, and the other comprises a nanobody. In some embodiments, the antigen binding domain of one of the first CAR and the second CAR comprises an scFv, and the other comprises a camelid VHH domain.

[0440] In some embodiments, when present on the surface of a cell, binding of the antigen binding domain of the first CAR to its cognate antigen is not substantially reduced by the presence of the second CAR. In some embodiments, binding of the antigen binding domain of the first CAR to its cognate antigen in the presence of the second CAR is 85%, 90%, 95%, 96%, 97%, 98% or 99% of binding of the antigen binding domain of the first CAR to its cognate antigen in the absence of the second CAR.

[0441] In some embodiments, when present on the surface of a cell, the antigen binding domains of the first CAR and the second CAR, associate with one another less than if both were scFv antigen binding domains. In some embodiments, the antigen binding domains of said first CAR said second CAR, associate with one another 85%, 90%, 95%, 96%, 97%, 98% or 99% less than if both were scFv antigen binding domains.

[0442] In another aspect, the CAR-expressing cell described herein can further express another agent, e.g., an agent which enhances the activity of a CAR-expressing cell. For example, in one embodiment, the agent can be an agent which inhibits an inhibitory molecule. Inhibitory molecules, e.g., PD1, can, in some embodiments, decrease the ability of a CAR-expressing cell to mount an immune effector response. Examples of inhibitory molecules include PD1, PD-L1, CTLA4, TIM3, CEACAM (e.g., CEACAM-1, CEACAM-3 and/or CEACAM-5), LAG3, VISTA, BTLA, TIGIT, LAIR1, CD160, 2B4, CD80, CD86, B7-H3 (CD276), B7-H4 (VTCN1), HVEM (TNFRSF14 or CD270), KIR, A2aR, MHC class I, MHC class II, GAL9, adenosine, and TGF beta.

[0443] In one embodiment, the agent which inhibits an inhibitory molecule, e.g., is a molecule described herein, e.g., an agent that comprises a first polypeptide, e.g., an inhibitory molecule, associated with a second polypeptide that provides a positive signal to the cell, e.g., an intracellular signaling domain described herein. In one embodiment, the agent comprises a first polypeptide, e.g., of an inhibitory molecule such as PD1, PD-L1, CTLA4, TIM3, CEACAM (e.g., CEACAM-1, CEACAM-3 and/or CEACAM-5), LAG3, VISTA, BTLA, TIGIT, LAIR1, CD160, 2B4, CD80, CD86, B7-H3 (CD276), B7-H4 (VTCN1), HVEM (TNFRSF14 or CD270), KIR, A2aR, MHC class I, MHC class II, GAL9, adenosine, and TGF beta, or a fragment of any of these (e.g., at least a portion of an extracellular domain of any of these), and a second polypeptide which is an intracellular signaling domain described herein (e.g., comprising a costimulatory domain (e.g., 41BB, CD27 or CD28, e.g., as described herein) and/or a primary signaling domain (e.g., a CD3 zeta signaling domain described herein). In one embodiment, the agent comprises a first polypeptide of PD1 or a fragment thereof (e.g., at least a portion of an extracellular domain of PD 1), and a second polypeptide of an intracellular signaling domain described herein (e.g., a CD28 signaling domain described herein and/or a CD3 zeta signaling domain described herein). PD1 is an inhibitory member of the CD28 family of receptors that also includes CD28, CTLA-4, ICOS, and BTLA. PD-1 is expressed on activated B cells, T cells and myeloid cells (Agata et al. 1996 Int. Immunol 8:765-75). Two ligands for PD1, PD-L1 and PD-L2 have been shown to downregulate T cell activation upon binding to PD1 (Freeman et a. 2000 J Exp Med 192:1027-34; Latchman et al. 2001 Nat Immunol 2:261-8; Carter et al. 2002 Eur J Immunol 32:634-43). PD-L1 is abundant in human cancers (Dong et al. 2003 J Mol Med 81:281-7; Blank et al. 2005 Cancer Immunol. Immunother 54:307-314; Konishi et al. 2004 Clin Cancer Res 10:5094). Immune suppression can be reversed by inhibiting the local interaction of PD1 with PD-L1.

[0444] In one embodiment, the agent comprises the extracellular domain (ECD) of an inhibitory molecule, e.g., Programmed Death 1 (PD1), fused to a transmembrane domain and intracellular signaling domains such as 41BB and CD3 zeta (also referred to herein as a PD1 CAR). In one embodiment, the PD1 CAR, when used incombinations with a XCAR described herein, improves the persistence of the T cell. In one embodiment, the CAR is a PD1 CAR comprising the extracellular domain of PD1 indicated as underlined in SEQ ID NO: 26. In one embodiment, the PD1 CAR comprises the amino acid sequence of SEQ ID NO:26. In one embodiment, the PD1 CAR comprises the amino acid sequence of SEQ ID NO:39).

[0445] In one embodiment, the agent comprises a nucleic acid sequence encoding the PD 1 CAR, e.g., the PD1 CAR described herein. In one embodiment, the nucleic acid sequence for the PD1 CAR is shown as SEQ ID NO: 27 in Table 1, with the sequence for PD1 ECD underlined.

[0446] In another aspect, the present disclosure provides a population of CAR-expressing cells. In some embodiments, the population of CAR-expressing cells comprises a mixture of cells expressing different CARs. For example, in one embodiment, the population of CART cells can include a first cell expressing a CAR having an antigen binding domain to a tumor antigen described herein, and a second cell expressing a CAR having a different antigen binding domain, e.g., an antigen binding domain to a different tumor antigen described herein, e.g., an antigen binding domain to a tumor antigen described herein that differs from the tumor antigen bound by the antigen binding domain of the CAR expressed by the first cell. As another example, the population of CAR-expressing cells can include a first cell expressing a CAR that includes an antigen binding domain to a tumor antigen described herein, and a second cell expressing a CAR that includes an antigen binding domain to a target other than a tumor antigen as described herein. In one embodiment, the population of CAR-expressing cells includes, e.g., a first cell expressing a CAR that includes a primary intracellular signaling domain, and a second cell expressing a CAR that includes a secondary signaling domain.

[0447] In another aspect, the present disclosure provides a population of cells wherein at least one cell in the population expresses a CAR having an antigen binding domain to a tumor antigen described herein, and a second cell expressing another agent, e.g., an agent which enhances the activity of a CAR-expressing cell. For example, in one embodiment, the agent can be an agent which inhibits an inhibitory molecule. Inhibitory molecules, e.g., PD-1, can, in some embodiments, decrease the ability of a CAR-expressing cell to mount an immune effector response. Examples of inhibitory molecules include PD-1, PD-L1, CTLA4, TIM3, CEACAM (e.g., CEACAM-1, CEACAM-3 and/or CEACAM-5), LAG3, VISTA, BTLA, TIGIT, LAIR1, CD160, 2B4, CD80, CD86, B7-H3 (CD276), B7-H4 (VTCN1), HVEM (TNFRSF14 or CD270), KIR, A2aR, MHC class I, MHC class II, GAL9, adenosine, and TGF beta. In one embodiment, the agent which inhibits an inhibitory molecule, e.g., is a molecule described herein, e.g., an agent that comprises a first polypeptide, e.g., an inhibitory molecule, associated with a second polypeptide that provides a positive signal to the cell, e.g., an intracellular signaling domain described herein. In one embodiment, the agent comprises a first polypeptide, e.g., of an inhibitory molecule such as PD-1, PD-L1, CTLA4, TIM3, CEACAM (e.g., CEACAM-1, CEACAM-3 and/or CEACAM-5), LAG3, VISTA, BTLA, TIGIT, LAIR1, CD160, 2B4, CD80, CD86, B7-H3 (CD276), B7-H4 (VTCN1), HVEM (TNFRSF14 or CD270), KIR, A2aR, MHC class I, MHC class II, GAL9, adenosine, and TGF beta, or a fragment of any of these, and a second polypeptide which is an intracellular signaling domain described herein (e.g., comprising a costimulatory domain (e.g., 41BB, CD27, OX40 or CD28, e.g., as described herein) and/or a primary signaling domain (e.g., a CD3 zeta signaling domain described herein). In one embodiment, the agent comprises a first polypeptide of PD-1 or a fragment thereof, and a second polypeptide of an intracellular signaling domain described herein (e.g., a CD28 signaling domain described herein and/or a CD3 zeta signaling domain described herein).

[0448] In one aspect, the present disclosure provides methods comprising administering a population of CAR-expressing cells, e.g., a mixture of cells expressing different CARs, in combination with another agent, e.g., a kinase inhibitor, such as a kinase inhibitor described herein. In another aspect, the present disclosure provides methods comprising administering a population of cells wherein at least one cell in the population expresses a CAR having an antigen binding domain of a tumor antigen described herein, and a second cell expressing another agent, e.g., an agent which enhances the activity of a CAR-expressing cell, in combination with another agent, e.g., a kinase inhibitor, such as a kinase inhibitor described herein.

### Exemplary CAR Molecules

[0449] In one aspect, the BCA CAR comprises a CAR molecule comprising an antigen binding domain that binds to a B cell antigen. In one embodiment, the BCA CAR comprises a CAR molecule comprising a CD19 antigen binding domain (e.g., a murine, human or humanized antibody or antibody fragment that specifically binds to CD19), a transmembrane domain, and an intracellular signaling domain (e.g., an intracellular signaling domain comprising a costimulatory domain and/or a primary signaling domain).

[0450] Exemplary CAR molecules of a BCA CAR described herein are provided in Table 10. The CAR molecules in Table 10 comprise a CD19 antigen binding domain, e.g., an amino acid sequence of any CD19 antigen binding domain provided in Table 6.

TABLE 10
Exemplary CD19 CAR molecules

| B cell | | | SEQ |
|---|---|---|---|
| antigen | Name | Amino Acid Sequence | ID NO: |
| CD19 | CTL019 | MALPVTALLLPLALLLHAARPDIQMTQTTSSLSASLGDRVTISCRASQDISKYL | 281 |
| | | NWYQQKPDGTVKLLIYHTSRLHSGVPSRFSGSGSGTDYSLTISNLEQEDIATYF | |
| | | CQQGNTLPYTFGGGTKLEITGGGGSGGGGSGGGGSEVKLQESGPGLVAPSQSLS | |
| | | VTCTVSGVSLPDYGVSWIRQPPRKGLEWLGVIWGSETTYYNSALKSRLTIIKDN | |
| | | SKSQVFLKMNSLQTDDTAIYYCAKHYYYGGSYAMDYWGQGTSVTVSSTTTPAPR | |
| | | PPTPAPTIASQPLSLRPEACRPAAGGAVHTRGLDFACDIYIWAPLAGTCGVLLL | |
| | | SLVITLYCKRGRKKLLYIFKQPFMRPVQTTQEEDGCSCRFPEEEEGGCELRVKF | |
| | | SRSADAPAYKQGQNQLYNELNLGRREEYDVLDKRRGRDPEMGGKPRRKNPQEGL | |
| | | YNELQKDKMAEAYSEIGMKGERRRGKGHDGLYQGLSTATKDTYDALHMQALPPR | |
| CD19 | CAR 1 | MALPVTALLLPLALLLHAARPEIVMTQSPATLSLSPGERATLSCRASQDISKYL | 269 |
| | | NWYQQKPGQAPRLLIYHTSRLHSGIPARFSGSGSGTDYTLTISSLQPEDFAVYF | |
| | | CQQGNTLPYTFGQGTKLEIKGGGGSGGGGSGGGGSQVQLQESGPLGVKPSETLS | |
| | | LTCTVSGVSLPDYGVSWIRQPPGKGLEWIGVIWGSETTYYSSSLKSRVTISKDN | |
| | | SKNQVSLKLSSVTAADTAVYYCAKHYYYGGSYAMDYWGQGTLVTVSSTTTPAPR | |
| | | PPTPAPTIASQPLSLRPEACRPAAGGAVHTRGLDFACDIYIWAPLAGTCGVLLL | |
| | | SLVITLYCKRGRKKLLYIFKQPFMRPVQTTQEEDGCSCRFPEEEEGGCELRVKF | |
| | | SRSADAPAYKQGQNQLYNELNLGRREEYDVLDKRRGRDPEMGGKPRRKNPQEGL | |
| | | YNELQKDKMAEAYSEIGMKGERRRGKGHDGLYQGLSTATKDTYDALHMQALPPR | |
| CD19 | CAR 2 | MALPVTALLLPLALLLHAARPEIVMTQSPATLSLSPGERATLSCRASQDISKYL | 270 |
| | | NWYQQKPGQAPRLLIYHTSRLHSGIPARFSGSGSGTDYTLTISSLQPEDFAVYF | |
| | | CQQGNTLPYTFGQGTKLEIKGGGGSGGGGSGGGGSQVQLQESGPGLVKPSETLS | |
| | | LTCTVSGVSLPDYGVSWIRQPPGKGLEWIGVIWGSETTYYQSSLKSRVTISKDN | |
| | | SKNQVSLKLSSVTAADTAVYYCAKHYYYGGSYAMDYWGQGTLVTVSSTTTPAPR | |
| | | PPTPAPTIASQPLSLRPEACRPAAGGAVHTRGLDFACDIYIWAPLAGTCGVLLL | |
| | | SLVITLYCKRGRKKLLYIFKQPFMRPVQTTQEEDGCSCRFPEEEEGGCELRVKF | |
| | | SRSADAPAYKQGQNQLYNELNLGRREEYDVLDKRRGRDPEMGGKPRRKNPQEGL | |
| | | YNELQKDKMAEAYSEIGMKGERRRGKGHDGLYQGLSTATKDTYDALHMQALPPR | |
| CD19 | CAR 3 | MALPVTALLLPLALLLHAARPQVQLQESGPGLVKPSETLSLTCTVSGVSLPDYG | 271 |
| | | VSWIRQPPGKGLEWIGVIWGSETTYYSSSLKSRVTISKDNSKNQVSLKLSSVTA | |
| | | ADTAVYYCAKHYYYGGSYAMDYWGQGTLVTVSSGGGGSGGGGSGGGGSEIVMTQ | |
| | | SPATLSLSPGERATLSCRASQDISKYLNWYQQKPGQAPRLLIYHTSRLHSGIPA | |
| | | RFSGSGSGTDYTLTISSLQPEDFAVYFCQQGNTLPYTFGQGTKLEIKTTTPAPR | |
| | | PPTPAPTIASQPLSLRPEACRPAAGGAVHTRGLDFACDIYIQAPLAGTCGVLLL | |
| | | SLVITLYCKRGRKKLLYIFKQPFMRPVQTTQEEDGCSCRFPEEEEGGCELRVKF | |
| | | SRSADAPAYKQGQNQLYNELNLGRREEYDVLDKRRGRDPEMGGKPRRKNPQEGL | |
| | | YNELQKDKMAEAYSEIGMKGERRRGKGHDGLYQGLSTATKDTYDALHMQALPPR | |
| CD19 | CAR 4 | MALPVTALLLPLALLLHAARPQVQLQESGPGLVKPSETLSLTCTVSGVSLPDYG | 272 |
| | | VSWIRQPPGKGLEWIGVIWGSETTYYQSSLKSRVTISKDNSKNQVSLKLSSVTA | |
| | | ADTAVYYCAKHYYYGGSYAMDYWGQGTLVTVSSGGGGSGGGGSGGGGSEIVMTQ | |
| | | SPATLSLSPGERATLSCRASQDISKYLNWYQQKPGQAPRLLIYHYSRLHSGIPA | |
| | | RFSGSGSGTDYTLTISSLQPEDFAVYFCQQGNTLPYTFGQGTKLEIKTTTPAPR | |
| | | PPTPAPTIASQPLSLRPEACRPAAGGAVHTRGLDFACDIYIWAPLAGTCGVLLL | |
| | | SLVITLYCKRGRKKLLYIFKQPFMRPVQTTQEEDGCSCRFPEEEEGGCELRVKF | |
| | | SRSADAPAYKQGQNQLYNELNLGRREEYDVLDKRRGRDPEMGGKPRRKNPQEGL | |
| | | YNELQKDKMAEAYSEIGMKGERRRGKGHDGLYQGLSTATKDTYDALHMQALPPR | |
| CD19 | CAR 5 | MALPVTALLLPLALLLHAARPEIVMTQSPATLSLSPGERATLSCRASQDISKYL | 273 |
| | | NWYQQKPGQAPRLLIYHTSRLHSGIPARFSGSGSGTDYTLTISSLQPEDFAVYF | |
| | | CQQGNTLPYTFGQGTKLEIKGGGGSGGGGSGGGGSGGGGSQVQLQESGPGLVKP | |
| | | SETLSLTCTVSGVSLPDYGVSWIRQPPGKGLEWIGVIWGSETTYYSSSLKSRVT | |
| | | ISKDNSKNQVSLKLSSVTAADTAVYYCAKHYYYGGSYAMDYWGQGTLVTVSSTT | |
| | | TPAPRPPTPAPTIASQPLSLRPEACRPAAGGAVHTRGLDFACDIYIWAPLAGTC | |
| | | GVLLLSLVITLYCKRGRKKLLYIFKQPFMRPVQTTQEEDGCSCRFPEEEEGGCE | |
| | | LRVKFSRSADAPAYKQGQNQLYNELNLGRREEYDVLDKRRGRDPEMGGKPRRKN | |
| | | PQEGLYNELQKDKMAEAYSEIGMKGERRRGKGHDGLYQGLSTATKDTYDALHMQ | |
| | | ALPPR | |
| CD19 | CAR 6 | MALPVTALLLPLALLLHAARPEIVMTQSPATLSLSPGERATLSCRASQDISKYL | 274 |
| | | NWYQQKPGQAPRLLIYHTSRLHSGIPARFSGSGSGTDYTLTISSLQPEDFAVYF | |
| | | CQQGNTLPYTFGQGTKLEIKGGGGSGGGGSGGGGSGGGGSQVQLQESGPGLVKP | |
| | | SETLSLTCTVSGVSLPDYGVSWIRQPPGKGLEWIGVIWGSETTYYQSSLKSRVT | |
| | | ISKDNSKNQVSLKLSSVTAADTAVYYCAKHYYYGGSYAMDYWGQGTLVTVSSTT | |
| | | TPAPRPPTPAPTIASQPLSLRPEACRPAAGGAVHTRGLDFACDIYIWAPLAGTC | |
| | | GVLLLSLVITLYCKRGRKKLLYIFKQPFMRPVQTTQEEDGCSCRFPEEEEGGCE | |
| | | LRVKFSRSADAPAYKQGQNQLYNELNLGRREEYDVLDKRRGRDPEMGGKPRRKN | |
| | | PQEGLYNELQKDKMAEAYSEIGMKGERRRGKGHDGLYQGLSTATKDTYDALHMQ | |
| | | ALPPR | |
| CD19 | CAR 7 | MALPVTALLLPLALLLHAARPQVQLQESGPGLVKPSETLSLTCTVSGVSLPDYG | 275 |
| | | VSWIRQPPGKGLEWIGVIWGSETTYYSSSLKSRVTISKDNSKNQVSLKLSSVTA | |
| | | ADTAVYYCAKHYYYGGSYAMDYWGQGTLVTVSSGGGGSGGGGSGGGGSGGGGSE | |
| | | IVMTQSPATLSLSPGERATLSCRASQDISKYLNWYQQKPGQAPRLLIYHTSRLH | |
| | | SGIPARFSGSGSGTDYTLTISSLQPEDFAVYFCQQGNTLPYTFGQGTKLEIKTT | |
| | | TPAPRPPTPAPTIASQPLSLRPEACRPAAGGAVHTRGLDFACDIYIWAPLAGTC | |
| | | GVLLLSLCITLYCKRGRKKLLYIFKQPFMRPVQTTQEEDGCSCRFPEEEEGGCE | |
| | | LRVKFSRSADAPAYKQGQNQLYNELNLGRREEYDVDLKRRGRDPEMGGKPRRKN | |
| | | PQEGLYNELQKDKMAEAYSEIGMKGERRRGKGHDGLYQGLSTATKDTYDALHMQ | |
| | | ALPPR | |
| CD19 | CAR 8 | MALPVTALLLPLALLLHAARPQVQLQESGPGLKVPSETLSLTCTVSGVSLPDYG | 276 |
| | | VSWIRQPPGKGLEWIGVIWGSETTYYQSSLKSRVTISKDNSKNQVSLKLSSVTA | |
| | | ADTAVYYCAKHYYYGGSYAMDYWGQGTLVTVSSGGGGSGGGGSGGGGSGGGGSE | |
| | | IVMTQSPATLSLSPGERATLSCRASQDISKYLNWYQQKPGQAPRLLIYHTSRLH | |
| | | SGIPARFSGSGSGTDYTLTISSLQPEDFAVYFCQQGNTLPYTFGQGTKLEIKTT | |
| | | TPAPRPPTPAPTIASQPLSLRPEACRPAAGGAVHTRGLDFACDIYIWAPLAGTC | |
| | | GVLLLSLVITLYCKRGRKKLLYIFKQPFMRPVQTTQEEDGCSCRFPEEEEGGCE | |
| | | LRVKFSRSADAPAYKQGQNQLYNELNLGRREEYDVLDKRRGRDPEMGGKPRRKN | |
| | | PQEGLYNELQKDKMAEAYSEIGMKGERRRGKGHDGLYQGLSTATKDTYDALHMQ | |
| | | ALPPR | |
| CD19 | CAR 9 | MALPVTALLLPLALLLHAARPEIVMTQSPATLSLSPGERATLSCRASQDISKYL | 277 |
| | | NWYQQKPGQAPRLLIYHTSRLHSGIPARFSGSGSGTDYTLTISSLQPEDFAVYF | |
| | | CQQGNTLPYTFGQGTKLEIKGGGGSGGGGSGGGGSGGGGSQVQLQESGPGLVKP | |
| | | SETLSLTCTVSGVSLPDYGVSWIRQPPGKGLEWIGVIWGSETTYYNSSLKSRVT | |
| | | ISKDNSKNQVSLKLSSVTAADTAVYYCAKHYYYGGSYAMDYWGQGTLVTVSSTT | |
| | | TPAPRPPTPAPTIASQPLSLRPEACRPAAGGAVHTRGLDFACDIYIWAPLAGTC | |
| | | GVLLLSLVITLYCKRGRKKLLYIFKQPFMRPVQTTQEEDGCSCRFPEEEEGGCE | |
| | | LRVKFSRSADAPAYKQGQNQLYNELNLGRREEYDVLDKRRGRDPEMGGKPRRKN | |
| | | PQEGLYNELQKDKMAEAYSEIGMKGERRRGKGHDGLYQGLSTATKDTYDALHMQ | |
| | | ALPPR | |
| CD19 | CAR 10 | MALPVTALLLPLALLLHAARPEIVMTQSPATLSLSPGERATLSCRASQDISKYL | 278 |
| | | NWYQQKPGQAPRLLIHYTSRLHSGIPARFSGSGSGTDYTLTISSLQPEDFAVYF | |
| | | CQQGNTLPYTFGQGTKLEIKGGGGSGGGGSGGGGSGGGGSQVQLQESGPGLVKP | |
| | | SETLSLTCTVSGVSLPDYGVSWIRQPPGKGLEWIGVIWGSETTYYNSSLKSRVT | |
| | | ISKDNSKNQVSLKLSSVTAADTAVYYCAKHYYYGGSYAMDYWGQGTLVTVSSTT | |
| | | TPAPRPPTPAPTIASQPLSLRPEACRPAAGGAVHTRGLDFACDIYIWAPLAGTC | |
| | | GVLLLSLVITLYCKRGRKKLLYIFKQPFMRPVQTTQEEDGCSCRFPEEEEGGCE | |
| | | LRVKFSRSADAPAYKQGQNQLYNELNLGRREEYDVLDKRRGRDPEMGGKPRRKN | |
| | | PQEGLYNELQKDKMAEAYSEIGMKGERRRGKGHDGLYQGLSTATKDTYDALHMQ | |
| | | ALPPR | |
| CD19 | CAR 11 | MALPVTALLLPLALLLHAARPQVQLQESGPGLVKPSETLSLTCTVSGVSLPDYG | 279 |
| | | VSWIRQPPGKGLEWIGVIWGSETTYYNSSLKSRVTISKDNSKNQVSLKLSSVTA | |
| | | ADTAVYYCAKHYYYGGSYAMDYWGQGTLVTVSSGGGGSGGGGSGGGGSGGGGSE | |
| | | IVMTQSPATLSLSPGERATLSCRASQDISKYLNWYQQKPGQAPRLLIHYTSRLH | |
| | | SGIPARFSGSGSGTDYTLTISSLQPEDFAVYFCQQGNTLPYTFGQGTKLEIKTT | |
| | | TPAPRPPTPAPTIASQPLSLRPEACRPAAGGAVHTRGLDFACDIYIWAPLAGTC | |
| | | GVLLLSLVITLYCKRGRKKLLYIFKQPFMRPVQTTQEEDGCSCRFPEEEEGGCE | |
| | | LRVKFSRSADAPAYKQGQNQLYNELNLGRREEYDVLDKRRGRDPEMGGKPRRKN | |
| | | PQEGLYNELQKDKMAEAYSEIGMKGERRRGKGHDGLYQGLSTATKDTYDALHMQ | |
| | | ALPPR | |
| CD19 | CAR 12 | MALPVTALLLPLALLLHAARPEIVMTQSPATLSLSPGERATLSCRASQDISKYL | 280 |
| | | NWYQQKPGQAPRLLIYHTSRLHSGIPARFSGSGSGTDYTLTISSLQPEDFAVYF | |
| | | CQQGNTLPYTFGQGTKLEIKGGGGSGGGGSGGGGSQVQLQESGPGLVKPSETLS | |
| | | LTCTVSGVSLPDYGVSWIRQPPGKGLEWIGVIWGSETTYYNSSLKSRVTISKDN | |
| | | SKNQVSLKLSSVTAADTAVYYCAKHYYYGGSYAMDYWGQGTLVTVSSTTTPAPR | |
| | | PPTPAPTIASQPLSLRPEACRPAAGGAVHTRGLDFACDIYIWAPLAGTCGVLLL | |
| | | SLVITLYCKRGRKKLLYIFKQPFMRPVQTTQEEDGCSCRFPEEEEGGCELRVKF | |
| | | SRSADAPAYKQGQGQLYNELNLGRREEYDVLDKRRGRDPEMGGKPRRKNPQEGL | |
| | | YNELQKDKMAEAYSEIGMKGERRRGKGHDGLYQGLSTATKDTYDALHMQALPPR | |

[0451] In one embodiment, the CAR molecule of the BCA CAR comprises (e.g., consists of) an amino acid sequence as provided in Table 10, or in Table 3 of International Publication No. WO2014/153270, filed Mar. 15, 2014; incorporated herein by reference. In one embodiment, the CAR molecule of the BCA CAR comprises (e.g., consists of) an amino acid sequence of SEQ ID NO: 269, SEQ ID NO: 270, SEQ ID NO: 271, SEQ ID NO: 272, SEQ ID NO: 273, SEQ ID NO: 274, SEQ ID NO: 275, SEQ ID NO: 276, SEQ ID NO: 277, SEQ ID NO: 278, SEQ ID NO: 279, SEQ ID NO: 280, or SEQ ID NO: 281; or an amino acid sequence having at least one, two, three, four, five, 10, 15, 20 or 30 modifications (e.g., substitutions, e.g., conservative substitutions) but not more than 60, 50, or 40 modifications (e.g., substitutions, e.g., conservative substitutions) of an amino acid sequence of SEQ ID NO: 269, SEQ ID NO: 270, SEQ ID NO: 271, SEQ ID NO: 272, SEQ ID NO: 273, SEQ ID NO: 274, SEQ ID NO: 275, SEQ ID NO: 276, SEQ ID NO: 277, SEQ ID NO: 278, SEQ ID NO: 279, SEQ ID NO: 280, or SEQ ID NO: 281; or an amino acid sequence having 85%, 90°/%, 95%, 96%, 97%, 98%, 99% identity to an amino acid sequence of SEQ ID NO: 269, SEQ ID NO: 270, SEQ ID NO: 271, SEQ ID NO: 272, SEQ ID NO: 273, SEQ ID NO: 274, SEQ ID NO: 275, SEQ ID NO: 276, SEQ ID NO: 277, SEQ ID NO: 278, SEQ ID NO: 279, SEQ ID NO: 280, or SEQ ID NO: 281.

[0452] In one aspect, the BCA CAR comprises a CAR molecule comprising an antigen binding domain that binds to a B cell antigen. In one embodiment, the BCA CAR comprises a CAR molecule comprising a BCMA antigen binding domain (e.g., a murine, human or humanized antibody or antibody fragment that specifically binds to BCMA, e.g., human BCMA), a transmembrane domain, and an intracellular signaling domain (e.g., an intracellular signaling domain comprising a costimulatory domain and/or a primary signaling domain).

[0453] Exemplary CAR molecules of a BCA CAR described herein are provided in Table 16, or Table 1 of WO2016/014565, or as otherwise described herein. The CAR molecules in Table 16 comprise a BCMA antigen binding domain, e.g., an amino acid sequence of any BCMA antigen binding domain provided in Table 12 or 13.

TABLE 16
Exemplary BCMA CAR molecules.
Sequences are provided with a leader sequence.

| | | |
|---|---|---|
| Name/ | | |
| Description | SEQ ID NO: | Sequence |

139109

| | | |
|---|---|---|
| 139109-aa | 959 | MALPVTALLLPLALLLHAARPEVQLVESGGGLVQPGGSLRLSCAVSGFALS |
| Full CAR | | NHGMSWVRRAPGKGLEWVSGIVYSGSTYYAASVKGRFTISRDNSRNTLYLQ |
| | | MNSLRPEDTAIYYCSAHGGESDVWGQGTTVTVSSASGGGGSGGRASGGGGS |
| | | DIQLTQSPSSLSASVGDRVTITCRASQSISSYLNWYQQKPGKAPKLLIYAA |
| | | SSLQSGVPSRFSGSGSGTDFTLTISSLQPEDFATYYCQQSYSTPYTFGQGT |
| | | KVEIKTTTPAPRPPTPAPTIASQPSLSRPEACRPAAGGAVHTRGLDFACDI |
| | | YIWAPLAGTCGVLLLSLVITLYCKRGRKKLLIYFKQPFMRPVQTTQEEDGC |
| | | SCRFPEEEEGGCELRVKFSRSADAPAYKQGQNQLYNELNLGRREEYDVLDK |
| | | RRGRDPEMGGKPRRKNPQEGLYNELQKDKMAEAYSEIGMKGERRRGKGHDG |
| | | LYQGLSTATKDTYDALHMQALPPR |
| 139109-nt | 974 | ATGGCCCTCCCTGTCACCGCCCTGCTGCTTCCGCTGGCTCTTCTGCTCCAC |
| Full CAR | | GCCGCTCGGCCCGAAGTGCAATTGGTGGAATCAGGGGGAGGACTTGTGCAG |
| | | CCTGGAGGATCGCTGAGACTGTCATGTGCCGTGTCCGGCTTTGCCCTGTCC |
| | | AACCACGGGATGTCCTGGGTCCGCCGCGCGCCTGGAAAGGGCCTCGAATGG |
| | | GTGTCGGGTATTGTGTACAGCGGTAGCACCTACTATGCCGCATCCGTGAAG |
| | | GGGAGATTCACCATCAGCCGGGACAACTCCAGGAACACTCTGTACCTCCAA |
| | | ATGAATTCGCTGAGGCCAGAGGACACTGCCATCTACTACTGCTCCGCGCAT |
| | | GGCGGAGAGTCCGACGTCTGGGGACAGGGGACCACCGTGACCGTGTCTAGC |
| | | GCGTCCGGCGGAGGCGGCAGCGGGGGTCGGGCATCAGGGGGCGGCGGATCG |
| | | GACATCCAGCTCACCCAGTCCCCGAGCTCGCTGTCCGCCTCCGTGGGAGAT |
| | | CGGGTCACCATCACGTGCCGCGCCAGCCAGTCGATTTCCTCCTACCTGAAC |
| | | TGGTACCAACAGAAGCCCGGAAAAGCCCCGAAGCTTCTCATCTACGCCGCC |
| | | TCGAGCCTGCAGTCAGGAGTGCCCTCACGGTTCTCCGGCTCCGGTTCCGGT |
| | | ACTGATTTCACCCTGACCATTTCCTCCCTGCAACCGGAGGACTTCGCTACT |
| | | TACTACTGCCAGCAGTCGTACTCCACCCCCTACACTTTCGGACAAGGCACC |
| | | AAGGTCGAAATCAAGACCACTACCCCAGCACCGAGGCCACCCACCCCGGCT |
| | | CCTACCATCGCCTCCCAGCCTCTGTCCCTGCGTCCGGAGGCATGTAGACCC |
| | | GCAGCTGGTGGGGCCGTGCATACCCGGGGTCTTGACTTCGCCTGCGATATC |
| | | TACATTTGGGCCCCTCTGGCTGGTACTTGCGGGGTCCTGCTGCTTTCACTC |
| | | GTGATCACTCTTTACTGTAAGCGCGGTCGGAAGAAGCTGCTGTACATCTTT |
| | | AAGCAACCCTTCATGAGGCCTGTGCAGACTACTCAAGAGGAGGACGGCTGT |
| | | TCATGCCGGTTCCCAGAGGAGGAGGAAGGCGGCTGCGAACTGCGCGTGAAA |
| | | TTCAGCCGCAGCGCAGATGCTCCAGCCTACAAGCAGGGGCAGAACCAGCTC |
| | | TACAACGAACTCAATCTTGGTCGGAGAGAGGAGTACGACGTGCTGGACAAG |
| | | CGGAGAGGACGGGACCCAGAAATGGGCGGGAAGCCGCGCAGAAAGAATCCC |
| | | CAAGAGGGCCTGTACAACGAGCTCCAAAAGGATAAGATGGCAGAAGCCTAT |
| | | AGCGAGATTGGTATGAAAGGGGAACGCAGAAGAGGCAAAGGCCACGACGGA |
| | | CTGTACCAGGGACTCAGCACCGCCACCAAGGACACCTATGACGCTCTTCAC |
| | | ATGCAGGCCCTGCCGCCTCGG |

139103

| | | |
|---|---|---|
| 139103-aa | 949 | MALPVTALLLPLALLLHAARPQVQLVESGGGLVQPGRSLRLSCAASGFTFS |
| Full CAR | | NYAMSWVRQAPGKGLGWVSGISRSGENTYYADSVKGRFTISRDNSKNTLYL |
| | | QMNSLRDEDTAVYYCARSPAHYYGGMDVWGQGTTVTVSSASGGGGSGGRAS |
| | | GGGGSDIVLTQSPGTLSLSPGERATLSCRASQSISSSFLAWYQQKPGQPAR |
| | | LLIYGASRRATGIPDRFSGSGSGTDFTLTISRLEPEDSAVYYCQQYHSSPS |
| | | WTFGQGTKLEIKTTTPAPRPPTPAPTIASQPLSLRPEACRPAAGGAVHTRG |
| | | LDFACDIYIWAPLAGTCGVLLLSLVITLYCKRGRKKLKYIFKQPFMRPVQT |
| | | TQEEDGCSCRFPEEEEGGCELRVKFSRSADAPAYKQGQNQLYNELNLGRRE |
| | | EYDVLDKRRGRDPEMGGKPRRKNPQEGLYNELQKDKMAEAYSEIGMKGERR |
| | | RGKGHDGLYQGLSTATKDTYDALHMQALPPR |
| 139103-nt | 964 | ATGGCCCTCCCTGTCACCGCCCTGCTGCTTCCGCTGGCTCTTCTGCTCCAC |
| Full CAR | | GCCGCTCGGCCCCAAGTGCAACTCGTGGAATCTGGTGGAGGACTCGTGCAA |
| | | CCCGGAAGATCGCTTAGACTGTCGTGTGCCGCCAGCGGGTTCACTTTCTCG |
| | | AACTACGCGATGTCCTGGGTCCGCCAGGCACCCGGAAAGGGACTCGGTTGG |
| | | GTGTCCGGCATTTCCCGGTCCGGCGAAAATACCTACTACGCCGACTCCGTG |
| | | AAGGGCCGCTTCACCATCTCAAGGGACAACAGCAAAAACACCCTGTACTTG |
| | | CAAATGAACTCCCTGCGGGATGAAGATACAGCCGTGTACTATTGCGCCCGG |
| | | TCGCCTGCCCATTACTACGGCGGAATGGACGTCTGGGGACAGGGAACCACT |
| | | GTGACTGTCAGCAGCGCGTCGGGTGGCGGCGGCTCAGGGGGTCGGGCCTCC |
| | | GGGGGGGGAGGGTCCGACATCGTGCTGACCCAGTCCCCGGGAACCCTGAGC |
| | | CTGAGCCCGGGAGAGCGCGCGACCCTGTCATGCCGGGCATCCCAGAGCATT |
| | | AGCTCCTCCTTTCTCGCCTGGTATCAGCAGAAGCCCGGACAGGCCCCGAGG |
| | | CTGCTGATCTACGGCGCTAGCAGAAGGGCTACCGGAATCCCAGACCGGTTC |
| | | TCCGGCTCCGGTTCCGGGACCGATTTCACCCTTACTATCTCGCGCCTGGAA |
| | | CCTGAGGACTCCGCCGTCTACTACTGCCAGCAGTACCACTCATCCCCGTCG |
| | | TGGACGTTCGGACAGGGCACCAAGCTGGAGATTAAGACCACTACCCCAGCA |
| | | CCGAGGCCACCCACCCCGGCTCCTACCATCGCCTCCCAGCCTCTGTCCCTG |
| | | CGTCCGGAGGCATGTAGACCCGCAGCTGGTGGGGCCGTGCATACCCGGGGT |
| | | CTTGACTTCGCCTGCGATATCTACATTTGGGCCCCTCTGGCTGGTACTTGC |
| | | GGGGTCCTGCTGCTTTCACTCGTGATCACTCTTTACTGTAAGCGCGGTCGG |
| | | AAGAAGCTGCTGTACATCTTTAAGCAACCCTTCATGAGGCCTGTGCAGACT |
| | | ACTCAAGAGGAGGACGGCTGTTCATGCCGGTTCCCAGAGGAGGAGGAAGGC |
| | | GGCTGCGAACTGCGCGTGAAATTCAGCCGCAGCGCAGATGCTCCAGCCTAC |
| | | AAGCAGGGGCAGAACCAGCTCTACAACGAACTCAATCTTGGTCGGAGAGAG |
| | | GAGTACGACGTGCTGGACAAGCGGAGAGGACGGGACCCAGAAATGGGCGGG |
| | | AAGCCGCGCAGAAAGAATCCCCAAGAGGGCCTGTACAACGAGCTCCAAAAG |
| | | GATAAGATGGCAGAAGCCTATAGCGAGATTGGTATGAAAGGGGAACGCAGA |
| | | AGAGGCAAAGGCCACGACGGACTGTACCAGGGACTCAGCACCGCCACCAAG |
| | | GACACCTATGACGCTCTTCACATGCAGGCCCTGCCGCCTCGG |

139105

| | | |
|---|---|---|
| 139105-aa | 950 | MALPVTALLLPLALLLHAARPQVQLVESGGGLVQPGRSLRLSCAASGFTFD |
| Full CAR | | DYAMHWVRQAPGKGLEWVSGISWNSGSIGYADSVKGRFTISRDNAKNSLYL |
| | | QMNSLRAEDTALYYCSVHSFLAYWGQGTLVTVSSASGGGGSGGRASGGGGS |
| | | DIVMTQTPLSLPVTPGEPASISCRSSQSLLHSNGYNYLDWYLQKPGQSPQL |
| | | LIYLGSNRASGVPDRFSGSGSGTDFTLKISRVEAEDVGVYYCMQALQTPYT |
| | | FGQGTKVEIKTTTPAPRPPTPAPTIASQPLSLRPEACRPAAGGAVHTRGLD |
| | | FACDIYIWAPLAGTCGVLLLSLVITLYCKRGRKKLLYIFKQPFMRPVQTTQ |
| | | EEDGCSCRFPEEEEGGCELRVKFSRSADAPAYKQGQNQLYNELNLGRREEY |
| | | DVLDKRRGRDPEMGGKPRRKNPQEGLYNELQKDKMAEAYSEIGMKGERRRG |
| | | KGHDGLYQGLSTATDKTYDALHMQALPPR |
| 193015-nt | 965 | ATGGCCCTCCCTGTCACCGCCCTGCTGCTTCCGCTGGCTCTTCTGCTCCAC |
| Full CAR | | GCCGCTCGGCCCCAAGTGCAACTCGTCGAATCCGGTGGAGGTCTGGTCCAA |
| | | CCTGGTAGAAGCCTGAGACTGTCGTGTGCGGCCAGCGGATTCACCTTTGAT |
| | | GACTATGCTATGCACTGGGTGCGGCAGGCCCCAGGAAAGGGCCTGGAATGG |
| | | GTGTCGGGAATTAGCTGGAACTCCGGGTCCATTGGCTACGCCGACTCCGTG |
| | | AAGGGCCGCTTCACCATCTCCCGCGACAACGCAAAGAACTCCCTGTACTTG |
| | | CAAATGAACTCGCTCAGGGCTGAGGATACCGCGCTGTACTACTGCTCCGTG |
| | | CATTCCTTCCTGGCCTACTGGGGACAGGGAACTCTGGTCACCGTGTCGAGC |
| | | GCCTCCGGCGGCGGGGGCTCGGGTGGACGGGCCTCGGGCGGAGGGGGGTCC |
| | | GACATCGTGATGACCCAGACCCCGCTGAGCTTGCCCGTGACTCCCGGAGAG |
| | | CCTGCATCCATCTCCTGCCGGTCATCCCAGTCCCTTCTCCACTCCAACGGA |
| | | TACAACTACCTCGACTGGTACCTCCAGAAGCCGGGACAGAGCCCTCAGCTT |
| | | CTGATCTACCTGGGGTCAAATAGAGCCTCAGGAGTGCCGGATCGGTTCAGC |
| | | GGATCTGGTTCGGGAACTGATTTCACTCTGAAGATTTCCCGCGTGGAAGCC |
| | | GAGGACGTGGGCGTCTACTACTGTATGCAGGCGCTGCAGACCCCCTATACC |
| | | TTCGGCCAAGGGACGAAAGTGGAGATCAAGACCACTACCCCAGCACCGAGG |
| | | CCACCCACCCCGGCTCCTACCATCGCCTCCCAGCCTCTGTCCCTGCGTCCG |
| | | GAGGCATGTAGACCCGCAGCTGGTGGGGCCGTGCATACCCGGGGTCTTGAC |
| | | TTCGCCTGCGATATCTACATTTGGGCCCCTCTGGCTGGTACTTGCGGGGTC |
| | | CTGCTGCTTTCACTCGTGATCACTCTTTACTGTAAGCGCGGTCGGAAGAAG |
| | | CTGCTGTACATCTTTAAGCAACCCTTCATGAGGCCTGTGCAGACTACTCAA |
| | | GAGGAGGACGGCTGTTCATGCCGGTTCCCAGAGGAGGAGGAAGGCGGCTGC |
| | | GAACTGCGCGTGAAATTCAGCCGCAGCGCAGATGCTCCAGCCTACAAGCAG |
| | | GGGCAGAACCAGCTCTACAACGAACTCAATCTTGGTCGGAGAGAGGAGTAC |
| | | GACGTGCTGGACAAGCGGAGAGGACGGGACCCAGAAATGGGCGGGAAGCCG |
| | | CGCAGAAAGAATCCCCAAGAGGGCCTGTACAACGAGCTCCAAAAGGATAAG |
| | | ATGGCAGAAGCCTATAGCGAGATTGGTATGAAAGGGGAACGCAGAAGAGGC |
| | | AAAGGCCACGACGGACTGTACCAGGGACTCAGCACCGCCACCAAGGACACC |
| | | TATGACGCTCTTCACATGCAGGCCCTGCCGCCTCGG |

139111

| | | |
|---|---|---|
| 139111-aa | 951 | MALPVTALLLPLALLLHAARPEVQLLESGGGLVQPGGSLRLSCAVSGFALS |
| Full CAR | | NHGMSEVRRAPGKGLEWVSGIVYSGSTYYAASVKGRFTISRDNSRNTLYLQ |
| | | MNSLRPEDTAIYYCSAHGGESDVWGQGTTVTVSSASGGGGSGGRASGGGGS |
| | | DIVMTQTPLSLSVTPGQPASISCKSSQSLLRNDGKTPLYWYLQKAGQPPQL |
| | | LIYEVSNRFSGVPDRFSGSGSGTDFTLKISRVEAEDVGAYYCMQNIQFPSF |
| | | GGGTKLEIKTTTPAPRPPTPAPTIASQPLSLRPEACRPAAGGAVHTRGLDF |
| | | ACDIYIWAPLAGTCGVLLLSVLITLYCKRGRKKLLYIFKQPFMRPVQTTQE |
| | | EDGCSCRFPEEEEGGCELRVKFSRSADAPAYKQGQNQLYNELNLGRREEYD |
| | | VLDKRRGRDPEMGGKPRRKNPQEGLYNELQKDKMAEAYSEIGMKGERRRGK |
| | | GHDGLYQGLSTATKDTYDALHMQALPPR |
| 139111-nt | 966 | ATGGCCCTCCCTGTCACCGCCCTGCTGCTTCCGCTGGCTCTTCTGCTCCAC |
| Full CAR | | GCCGCTCGGCCCGAAGTGCAATTGTTGGAATCTGGAGGAGGACTTGTGCAG |
| | | CCTGGAGGATCACTGAGACTTTCGTGTGCGGTGTCAGGCTTCGCCCTGAGC |
| | | AACCACGGCATGAGCTGGGTGCGGAGAGCCCCGGGGAAGGGTCTGGAATGG |
| | | GTGTCCGGGATCGTCTACTCCGGTTCAACTTACTACGCCGCAAGCGTGAAG |
| | | GGTCGCTTCACCATTTCCCGCGATAACTCCCGGAACACCCTGTACCTCCAA |
| | | ATGAACTCCCTGCGGCCCGAGGACACCGCCATCTACTACTGTTCCGCGCAT |
| | | GGAGGAGAGTCCGATGTCTGGGGACAGGGCACTACCGTGACCGTGTCGAGC |
| | | GCCTCGGGGGGAGGAGGCTCCGGCGGTCGCGCCTCCGGGGGGGGTGGCAGC |
| | | GACATTGTGATGACGCAGACTCCACTCTCGCTGTCCGTGACCCCGGGACAG |
| | | CCCGCGTCCATCTCGTGCAAGAGCTCCCAGAGCCTGCTGAGGAACGACGGA |
| | | AAGACTCCTCTGTATTGGTACCTCCAGAAGGCTGGACAGCCCCCGCAACTG |
| | | CTCATCTACGAAGTGTCAAATCGCTTCTCCGGGGTGCCGGATCGGTTTTCC |
| | | GGCTCGGGATCGGGCACCGACTTCACCCTGAAAATCTCCAGGGTCGAGGCC |
| | | GAGGACGTGGGAGCCTACTACTGCATGCAAAACATCCAGTTCCCTTCCTTC |
| | | GGCGGCGGCACAAAGCTGGAGATTAAGACCACTACCCCAGCACCGAGGCCA |
| | | CCCACCCCGGCTCCTACCATCGCCTCCCAGCCTCTGTCCCTGCGTCCGGAG |
| | | GCATGTAGACCCGCAGCTGGTGGGGCCGTGCATACCCGGGGTCTTGACTTC |
| | | GCCTGCGATATCTACATTTGGGCCCCTCTGGCTGGTACTTGCGGGGTCCTG |
| | | CTGCTTTCACTCGTGATCACTCTTTACTGTAAGCGCGGTCGGAAGAAGCTG |
| | | CTGTACATCTTTAAGCAACCCTTCATGAGGCCTGTGCAGACTACTCAAGAG |
| | | GAGGACGGCTGTTCATGCCGGTTCCCAGAGGAGGAGGAAGGCGGCTGCGAA |
| | | CTGCGCGTGAAATTCAGCCGCAGCGCAGATGCTCCAGCCTACAAGCAGGGG |
| | | CAGAACCAGCTCTACAACGAACTCAATCTTGGTCGGAGAGAGGAGTACGAC |
| | | GTGCTGGACAAGCGGAGAGGACGGGACCCAGAAATGGGCGGGAAGCCGCGC |
| | | AGAAAGAATCCCCAAGAGGGCCTGTACAACGAGCTCCAAAAGGATAAGATG |
| | | GCAGAAGCCTATAGCGAGATTGGTATGAAAGGGGAACGCAGAAGAGGCAAA |
| | | GGCCACGACGGACTGTACCAGGGACTCAGCACCGCCACCAAGGACACCTAT |
| | | GACGCTCTTCACATGCAGGCCCTGCCGCCTCGG |

139100

| | | |
|---|---|---|
| 139100-aa | 952 | MALPVTALLLPLALLLHAARPQVQLVQSGAEVRKTGASVKVSCKASGYIFD |
| Full CAR | | NFGINWVRQAPGQGLEWMGWINPKNNNTNYAQKFQGRVTITADESTNTAYM |
| | | EVSSLRSEDTAVYYCARGPYYYQSYMDVWGQGTMVTVSSASGGGGSGGRAS |
| | | GGGGSDIVMTQTPLSLPVTGPEPASISVRSSQSLLHSNGYNYLNWYLQKPG |
| | | QSPQLLIYLGSKRASGVPDRFSGSGSGTDFTLHITRVGAEDVGVYYCMQAL |
| | | QTPYTFGQGTKLEIKTTTPAPRPPTPAPTIASQPLSLRPEACRPAAGGAVH |
| | | TRGLDFACDIYIWAPLAGTCGVLLLSLVITLYCKRGRKKLLYIFKQPFMRP |
| | | VQTTQEEDGCSCRFPEEEEGGCELRVKFSRSADAPAYKQGQNQLYNELNLG |
| | | RREEYDVLDKRRGRDPEMGGKPRRKNPQEGLYNELQKDKMAEAYSEIGMKG |
| | | ERRRGKGHDGLYQGLSTATKDTYDALHMQALPPR |
| 139100-aa | 967 | ATGGCCCTCCCTGTCACCGCCCTGCTGCTTCCGCTGGCTCTTCTGCTCCAC |
| Full CAR | | GCCGCTCGGCCCCAAGTCCAACTCGTCCAGTCCGGCGCAGAAGTCAGAAAA |
| | | ACCGGTGCTAGCGTGAAAGTGTCCTGCAAGGCCTCCGGCTACATTTTCGAT |
| | | AACTTCGGAATCAACTGGGTCAGACAGGCCCCGGGCCAGGGGCTGGAATGG |
| | | ATGGGATGGATCAACCCCAAGAACAACAACACCAACTACGCACAGAAGTTC |
| | | CAGGGCCGCGTGACTATCACCGCCGATGAATCGACCAATACCGCCTACATG |
| | | GAGGTGTCCTCCCTGCGGTCGGAGGACACTGCCGTGTATTACTGCGCGAGG |
| | | GGCCCATACTACTACCAAAGCTACATGGACGTCTGGGGACAGGGAACCATG |
| | | GTGACCGTGTCATCCGCCTCCGGTGGTGGAGGCTCCGGGGGGCGGGCTTCA |
| | | GGAGGCGGAGGAAGCGATATTGTGATGACCCAGACTCCGCTTAGCCTGCCC |
| | | GTGACTCCTGGAGAACCGGCCTCCATTTCCTGCCGGTCCTCGCAATCACTC |
| | | CTGCATTCCAACGGTTACAACTACCTGAATTGGTACCTCCAGAAGCCTGGC |
| | | CAGTCGCCCCAGTTGCTGATCTATCTGGGCTCGAAGCGCGCCTCCGGGGTG |
| | | CCTGACCGGTTTAGCGGATCTGGGAGCGGCACGGACTTCACTCTCCACATC |
| | | ACCCGCGTGGGAGCGGAGGACGTGGGAGTGTACTACTGTATGCAGGCGCTG |
| | | CAGACTCCGTACACATTCGGACAGGGCACCAAGCTGGAGATCAAGACCACT |
| | | ACCCCAGCACCGAGGCCACCCACCCCGGCTCCTACCATCGCCTCCCAGCCT |
| | | CTGTCCCTGCGTCCGGAGGCATGTAGACCCGCAGCTGGTGGGGCCGTGCAT |
| | | ACCCGGGGTCTTGACTTCGCCTGCGATATCTACATTTGGGCCCCTCTGGCT |
| | | GGTACTTGCGGGGTCCTGCTGCTTTCACTCGTGATCACTCTTTACTGTAAG |
| | | CGCGGTCGGAAGAAGCTGCTGTACATCTTTAAGCAACCCTTCATGAGGCCT |
| | | GTGCAGACTACTCAAGAGGAGGACGGCTGTTCATGCCGGTTCCCAGAGGAG |
| | | GAGGAAGGCGGCTGCGAACTGCGCGTGAAATTCAGCCGCAGCGCAGATGCT |
| | | CCAGCCTACAAGCAGGGGCAGAACCAGCTCTACAACGAACTCAATCTTGGT |
| | | CGGAGAGAGGAGTACGACGTGCTGGACAAGCGGAGAGGACGGGACCCAGAA |
| | | ATGGGCGGGAAGCCGCGCAGAAAGAATCCCCAAGAGGGCCTGTACAACGAG |
| | | CTCCAAAAGGATAAGATGGCAGAAGCCTATAGCGAGATTGGTATGAAAGGG |
| | | GAACGCAGAAGAGGCAAAGGCCACGACGGACTGTACCAGGGACTCAGCACC |
| | | GCCACCAAGGACACCTATGACGCTCTTCACATGCAGGCCCTGCCGCCTCGG |

139101

| | | |
|---|---|---|
| 139101-aa | 953 | MALPVTALLLPLALLLHAARPQVQLQESGGGLVQPGGSLRLSCAASGFTFS |
| Full CAR | | SDAMTWVRQAPGKGLEWVSVISGSGGTTYYADSVKGRFTISRDNSKNTLYL |
| | | QMNSLRAEDTAVYYCAKLDSSGYYYARGPRYWGQGTLVTVSSASGGGGSGG |
| | | RASGGGGSDIQLTQSPSSLSASVGDRVTITCRASQSISSYLNWYQQKPGKA |
| | | PKLLIYGASTLASGVPARFSGSGSGTHFTLTINSLQSEDSATYYCQQSYKR |
| | | ASFGQGTKVEIKTTTPAPRPPTPAPTIASQPLSLRPEACRPAAGGAVHTRG |
| | | LDFACDIYIWAPLAGTCGVLLLSLVITLYCKRGRKKLLYIFKQPFMRPVQT |
| | | TQEEDGCSCRFPEEEEGGCELRVKFSRSADAPAYKQGQNQLYNELNLGRRE |
| | | EYDVLDKRRGRDPEMGGKPRRKNPQEGLYNELQKDKMAEAYSEIGMKGERR |
| | | RGKGHDGLYQGLSTATKDTYDALHMQALPPR |
| 139101-nt | 968 | ATGGCCCTCCCTGTCACCGCCCTGCTGCTTCCGCTGGCTCTTCTGCTCCAC |
| Full CAR | | GCCGCTCGGCCCCAAGTGCAACTTCAAGAATCAGGCGGAGGACTCGTGCAG |
| | | CCCGGAGGATCATTGCGGCTCTCGTGCGCCGCCTCGGGCTTCACCTTCTCG |
| | | AGCGACGCCATGACCTGGGTCCGCCAGGCCCCGGGGAAGGGGCTGGAATGG |
| | | GTGTCTGTGATTTCCGGCTCCGGGGGAACTACGTACTACGCCGATTCCGTG |
| | | AAAGGTCGCTTCACTATCTCCCGGGACAACAGCAAGAACACCCTTTATCTG |
| | | CAAATGAATTCCCTCCGCGCCGAGGACACCGCCGTGTACTACTGCGCCAAG |
| | | CTGGACTCCTCGGGCTACTACTATGCCCGGGGTCCGAGATACTGGGGACAG |
| | | GGAACCCTCGTGACCGTGTCCTCCGCGTCCGGCGGAGGAGGGTCGGGAGGG |
| | | CGGGCCTCCGGCGGCGGCGGTTCGGACATCCAGCTGACCCAGTCCCCATCC |
| | | TCACTGAGCGCAAGCGTGGGCGACAGAGTCACCATTACATGCAGGGCGTCC |
| | | CAGAGCATCAGCTCCTACCTGAACTGGTACCAACAGAAGCCTGGAAAGGCT |
| | | CCTAAGCTGTTGATCTACGGGGCTTCGACCCTGGCATCCGGGGTGCCCGCG |
| | | AGGTTTAGCGGAAGCGGTAGCGGCACTCACTTCACTCTGACCATTAACAGC |
| | | CTCCAGTCCGAGGATTCAGCCACTTACTACTGTCAGCAGTCCTACAAGCGG |
| | | GCCAGCTTCGGACAGGGCACTAAGGTCGAGATCAAGACCACTACCCCAGCA |
| | | CCGAGGCCACCCACCCCGGCTCCTACCATCGCCTCCCAGCCTCTGTCCCTG |
| | | CGTCCGGAGGCATGTAGACCCGCAGCTGGTGGGGCCGTGCATACCCGGGGT |
| | | CTTGACTTCGCCTGCGATATCTACATTTGGGCCCCTCTGGCTGGTACTTGC |
| | | GGGGTCCTGCTGCTTTCACTCGTGATCACTCTTTACTGTAAGCGCGGTCGG |
| | | AAGAAGCTGCTGTACATCTTTAAGCAACCCTTCATGAGGCCTGTGCAGACT |
| | | ACTCAAGAGGAGGACGGCTGTTCATGCCGGTTCCCAGAGGAGGAGGAAGGC |
| | | GGCTGCGAACTGCGCGTGAAATTCAGCCGCAGCGCAGATGCTCCAGCCTAC |
| | | AAGCAGGGGCAGAACCAGCTCTACAACGAACTCAATCTTGGTCGGAGAGAG |
| | | GAGTACGACGTGCTGGACAAGCGGAGAGGACGGGACCCAGAAATGGGCGGG |
| | | AAGCCGCGCAGAAAGAATCCCCAAGAGGGCCTGTACAACGAGCTCCAAAAG |
| | | GATAAGATGGCAGAAGCCTATAGCGAGATTGGTATGAAAGGGGAACGCAGA |
| | | AGAGGCAAAGGCCACGACGGACTGTACCAGGGACTCAGCACCGCCACCAAG |
| | | GACACCTATGACGCTCTTCACATGCAGGCCCTGCCGCCTCGG |

139102

| | | |
|---|---|---|
| 139102-aa | 954 | MALPVTALLLPLALLLHAARPQVQLVQSGAEVKKPGASVKVSCKASGYTFS |
| Full CAR | | NYGITWVRQAPGQGLEWMGWISAYNGNTNYAQKFQGRVTMTRNTSISTAYM |
| | | ELSSLRSEDTAVYYCARGPYYYYMDVWGKGTMVTVSSASGGGGSGGRASGG |
| | | GGSEIVMTQSPLSLPVTPGEPASISVRSSQSLLYSNGYNYVDWYLQKPGQS |
| | | PQLLIYLGSNRASGVPDRFSGSGSGTDFKLQISRVEAEDVGIYYCMQGRQF |
| | | PYSFGQGTKVEIKTTTPAPRPPTPAPTIASQPLSLRPEACRPAAGGAVHTR |
| | | GLDFACDIYIWAPLAGTCGVLLLSLVITLYCKRGRKKLLYIFKQPFMRPVQ |
| | | TTQEEDGCSCRFPEEEEGGCELRVKFSRSADAPAYKQGQNQLYNELNLGRR |
| | | EEYDVLDKRRGRDPEMGGKPRRKNPQEGLYNELQKDKMAEAYSEIGMKGER |
| | | RRGKGHDGLYQGLSTATKDTYDALHMQALPPR |
| 139201-nt | 969 | ATGGCCCTCCCTGTCACCGCCCTGCTGCTTCCGCTGGCTCTTCTGCTCCAC |
| Full CAR | | GCCGCTCGGCCCCAAGTCCAACTGGTCCAGAGCGGTGCAGAAGTGAAGAAG |
| | | CCCGGAGCGAGCGTGAAAGTGTCCTGCAAGGCTTCCGGGTACACCTTCTCC |
| | | AACTACGGCATCACTTGGGTGCGCCAGGCCCCGGGACAGGGCCTGGAATGG |
| | | ATGGGGTGGATTTCCGCGTACAACGGCAATACGAACTACGCTCAGAAGTTC |
| | | CAGGGTAGAGTGACCATGACTAGGAACACCTCCATTTCCACCGCCTACATG |
| | | GAACTGTCCTCCCTGCGGAGCGAGCACACCGCCGTGTACTATTGCGCCCGG |
| | | GGACCATACTACTACTACATGGATGTCTGGGGGAAGGGGACTATGGTCACC |
| | | GTGTCATCCGCCTCGGGAGGCGGCGGATCAGGAGGACGCGCCTCTGGTGGT |
| | | GGAGGATCGGAGATCGTGATGACCCAGAGCCCTCTCTCCTTGCCCGTGACT |
| | | CCTGGGGAGCCCGCATCCATTTCATGCCGGAGCTCCCAGTCACTTCTCTAC |
| | | TCCAACGGCTATAACTACGTGGATTGGTACCTCCAAAAGCCGGGCCAGAGC |
| | | CCGCAGCTGCTGATCTACCTGGGCTCGAACAGGGCCAGCGGAGTGCCTGAC |
| | | CGGTTCTCCGGGTCGGGAAGCGGGACCGACTTCAAGCTGCAAATCTCGAGA |
| | | GTGGAGGCCGAGGACGTGGGAATCTACTACTGTATGCAGGGCCGCCAGTTT |
| | | CCGTACTCGTTCGGACAGGGCACCAAAGTGGAAATCAAGACCACTACCCCA |
| | | GCACCGAGGCCACCCACCCCGGCTCCTACCATCGCCTCCCAGCCTCTGTCC |
| | | CTGCGTCCGGAGGCATGTAGACCCGCAGCTGGTGGGGCCGTGCATACCCGG |
| | | GGTCTTGACTTCGCCTGCGATATCTACATTTGGGCCCCTCTGGCTGGTACT |
| | | TGCGGGGTCCTGCTGCTTTCACTCGTGATCACTCTTTACTGTAAGCGCGGT |
| | | CGGAAGAAGCTGCTGTACATCTTTAAGCAACCCTTCATGAGGCCTGTGCAG |
| | | ACTACTCAAGAGGAGGACGGCTGTTCATGCCGGTTCCCAGAGGAGGAGGAA |
| | | GGCGGCTGCGAACTGCGCGTGAAATTCAGCCGCAGCGCAGATGCTCCAGCC |
| | | TACAAGCAGGGGCAGAACCAGCTCTACAACGAACTCAATCTTGGTCGGAGA |
| | | GAGGAGTACGACGTGCTGGACAAGCGGAGAGGACGGGACCCAGAAATGGGC |
| | | GGGAAGCCGCGCAGAAAGAATCCCCAAGAGGGCCTGTACAACGAGCTCCAA |
| | | AAGGATAAGATGGCAGAAGCCTATAGCGAGATTGGTATGAAAGGGGAACGC |
| | | AGAAGAGGCAAAGGCCACGACGGACTGTACCAGGGACTCAGCACCGCCACC |
| | | AAGGACACCTATGACGCTCTTCACATGCAGGCCCTGCCGCCTCGG |

139104

| | | |
|---|---|---|
| 139104-aa | 955 | MALPVTALLLPLALLLHAARPEVQLLETGGGLVQPGGSLRLSCAVSGFALS |
| Full CAR | | NHGMSWVRRAPGKGLEWVSGIVYSGSTYYAASVKGRFTISRDNSRNTLYLQ |
| | | MNSLRPEDTAIYYCSAHGGESDVWGQGTTVTVSSASGGGGSGGRASGGGGS |
| | | EIVLTQSPATLSVSPGESATLSCRASQSVSSNLAWYQQKPGQAPRLLIYGA |
| | | STRASGIPDRFSGSGSGTDFTLTISSLQAEDVAVYYCQQYGSSLTFGGGTK |
| | | VEIKTTTPAPRPPTPAPTIASQPLSLRPEACRPAAGGAVHTRGLDFACDIY |
| | | IWAPLAGTCGVLLLSVLITLYCKRGRKKLLYIFKQPFMRPVQTTQEEDGCS |
| | | CRFPEEEEGGCELRVKFSRSADAPAYKQGQNQLYNELNLGRREEYDVLDKR |
| | | RGRDPEMGGKPRRKNPQEGLYNELQKDKMAEAYSEIGMKGERRRGKGHDGL |
| | | YQGLSTATKDTYDALHMQALPPR |
| 139104-nt | 970 | ATGGCCCTCCCTGTCACCGCCCTGCTGCTTCCGCTGGCTCTTCTGCTCCAC |
| Full CAR | | GCCGCTCGGCCCGAAGTGCAATTGCTCGAAACTGGAGGAGGTCTGGTGCAA |
| | | CCTGGAGGATCACTTCGCCTGTCCTGCGCCGTGTCGGGCTTTGCCCTGTCC |
| | | AACCATGGAATGAGCTGGGTCCGCCGCGCGCCGGGGAAGGGCCTCGAATGG |
| | | GTGTCCGGCATCGTCTACTCCGGCTCCACCTACTACGCCGCGTCCGTGAAG |
| | | GGCCGGTTCACGATTTCACGGGACAACTCGCGGAACACCCTGTACCTCCAA |
| | | ATGAATTCCCTTCGGCCGGAGGATACTGCCATCTACTACTGCTCCGCCCAC |
| | | GGTGGCGAATCCGACGTCTGGGGCCAGGGAACCACCGTGACCGTGTCCAGC |
| | | GCGTCCGGGGGAGGAGGAAGCGGGGGTAGAGCATCGGGTGGAGGCGGATCA |
| | | GAGATCGTGCTGACCCAGTCCCCCGCCACCTTGAGCGTGTCACCAGGAGAG |
| | | TCCGCCACCCTGTCATGCCGCGCCAGCCAGTCCGTGTCCTCCAACCTGGCT |
| | | TGGTACCAGCAGAAGCCGGGGCAGGCCCCTAGACTCCTGATCTATGGGGCG |
| | | TCGACCCGGGCATCTGGAATTCCCGATAGGTTCAGCGGATCGGGCTCGGGC |
| | | ACTGACTTCACTCTGACCATCTCCTCGCTGCAAGCCGAGGACGTGGCTGTG |
| | | TACTACTGTCAGCAGTACGGAAGCTCCCTGACTTTCGGTGGCGGGACCAAA |
| | | GTCGAGATTAAGACCACTACCCCAGCACCGAGGCCACCCACCCCGGCTCCT |
| | | ACCATCGCCTCCCAGCCTCTGTCCCTGCGTCCGGAGGCATGTAGACCCGCA |
| | | GCTGGTGGGGCCGTGCATACCCGGGGTCTTGACTTCGCCTGCGATATCTAC |
| | | ATTTGGGCCCCTCTGGCTGGTACTTGCGGGGTCCTGCTGCTTTCACTCGTG |
| | | ATCACTCTTTACTGTAAGCGCGGTCGGAAGAAGCTGCTGTACATCTTTAAG |
| | | CAACCCTTCATGAGGCCTGTGCAGACTACTCAAGAGGAGGACGGCTGTTCA |
| | | TGCCGGTTCCCAGAGGAGGAGGAAGGCGGCTGCGAACTGCGCGTGAAATTC |
| | | AGCCGCAGCGCAGATGCTCCAGCCTACAAGCAGGGGCAGAACCAGCTCTAC |
| | | AACGAACTCAATCTTGGTCGGAGAGAGGAGTACGACGTGCTGGACAAGCGG |
| | | AGAGGACGGGACCCAGAAATGGGCGGGAAGCCGCGCAGAAAGAATCCCCAA |
| | | GAGGGCCTGTACAACGAGCTCCAAAAGGATAAGATGGCAGAAGCCTATAGC |
| | | GAGATTGGTATGAAAGGGGAACGCAGAAGAGGCAAAGGCCACGACGGACTG |
| | | TACCAGGGACTCAGCACCGCCACCAAGGACACCTATGACGCTCTTCACATG |
| | | CAGGCCCTGCCGCCTCGG |

139106

| | | |
|---|---|---|
| 139106-aa | 956 | MALPVTALLLPLALLLHAARPEVQLVETGGGLVQPGGSLRLSCAVSGFALS |
| Full CAR | | NHGMSWVRRAPGKGLEWVSGIVYSGSTYYAASVKGRFTISRDNSRNTLYLQ |
| | | MNSLRPEDTAIYYCSAHGGESDVWGQGTTVTVSSASGGGGSGGRASGGGGS |
| | | EIVMTQSPATLSVSPGERATLSCRASQSVSSKLAWYQQKPGQAPRLLMYGA |
| | | SIRATGIPDRFSGSGSGTEFTLTISSLEPEDFAVYYCQQYGSSSWTFGQGT |
| | | KVEIKTTTPAPRPPTPAPTIASQPLSLRPEACRPAAGGAVHTRGLDFACDI |
| | | YIWAPLAGTCGVLLLSLVITLYCKRGRKKLLYIFKQPFMRPVQTTQEEDGC |
| | | SCRFPEEEEGGCELRVKFSRSADAPAYKQGQNQLYNELNLGRREEYDVLDK |
| | | RRGRDPEMGGKPRRKNPQEGLYNELQKDKMAEAYSEIGMKGERRRGKGHDG |
| | | LYQGLSTATKDTYDALHMQALPPR |
| 139106-nt | 971 | ATGGCCCTCCCTGTCACCGCCCTGCTGCTTCCGCTGGCTCTTCTGCTCCAC |
| Full CAR | | GCCGCTCGGCCCGAAGTGCAATTGGTGGAAACTGGAGGAGGACTTGTGCAA |
| | | CCTGGAGGATCATTGAGACTGAGCTGCGCAGTGTCGGGATTCGCCCTGAGC |
| | | AACCATGGAATGTCCTGGGTCAGAAGGGCCCCTGGAAAAGGCCTCGAATGG |
| | | GTGTCAGGGATCGTGTACTCCGGTTCCACTTACTACGCCGCCTCCGTGAAG |
| | | GGGCGCTTCACTATCTCACGGGATAACTCCCGCAATACCCTGTACCTCCAA |
| | | ATGAACAGCCTGCGGCCGGAGGATACCGCCATCTACTACTGTTCCGCCCAC |
| | | GGTGGAGAGTCTGACGTCTGGGGCCAGGGAACTACCGTGACCGTGTCCTCC |
| | | GCGTCCGGCGGTGGAGGGAGCGGCGGCCGCGCCAGCGGCGGCGGAGGCTCC |
| | | GAGATCGTGATGACCCAGAGCCCCGCTACTCTGTCGGTGTCGCCCGGAGAA |
| | | AGGGCGACCCTGTCCTGCCGGGCGTCGCAGTCCGTGAGCAGCAAGCTGGCT |
| | | TGGTACCAGCAGAAGCCGGGCCAGGCACCACGCCTGCTTATGTACGGTGCC |
| | | TCCATTCGGGCCACCGGAATCCCGGACCGGTTCTCGGGGTCGGGGTCCGGT |
| | | ACCGAGTTCACACTGACCATTTCCTCGCTCGAGCCCGAGGACTTTGCCGTC |
| | | TATTACTGCCAGCAGTACGGCTCCTCCTCATGGACGTTCGGCCAGGGGACC |
| | | AAGGTCGAAATCAAGACCACTACCCCAGCACCGAGGCCACCCACCCCGGCT |
| | | CCTACCATCGCCTCCCAGCCTCTGTCCCTGCGTCCGGAGGCATGTAGACCC |
| | | GCAGCTGGTGGGGCCGTGCATACCCGGGGTCTTGACTTCGCCTGCGATATC |
| | | TACATTTGGGCCCCTCTGGCTGGTACTTGCGGGGTCCTGCTGCTTTCACTC |
| | | GTGATCACTCTTTACTGTAAGCGCGGTCGGAAGAAGCTGCTGTACATCTTT |
| | | AAGCAACCCTTCATGAGGCCTGTGCAGACTACTCAAGAGGAGGACGGCTGT |
| | | TCATGCCGGTTCCCAGAGGAGGAGGAAGGCGGCTGCGAACTGCGCGTGAAA |
| | | TTCAGCCGCAGCGCAGATGCTCCAGCCTACAAGCAGGGGCAGAACCAGCTC |
| | | TACAACGAACTCAATCTTGGTCGGAGAGAGGAGTACGACGTGCTGGACAAG |
| | | CGGAGAGGACGGGACCCAGAAATGGGCGGGAAGCCGCGCAGAAAGAATCCC |
| | | CAAGAGGGCCTGTACAACGAGCTCCAAAAGGATAAGATGGCAGAAGCCTAT |
| | | AGCGAGATTGGTATGAAAGGGGAACGCAGAAGAGGCAAAGGCCACGACGGA |
| | | CTGTACCAGGGACTCAGCACCGCCACCAAGGACACCTATGACGCTCTTCAC |
| | | ATGCAGGCCCTGCCGCCTCGG |

139107

| | | |
|---|---|---|
| 139107-aa | 957 | MALPVTALLLPLALLLHAARPEVQLVETGGGVVQPGGSLRLSCAVSGFALS |
| Full CAR | | NHGMSWVRRAPGKGLEWVSGIVYSGSTYYAASVKGRFTISRDNSRNTLYLQ |
| | | MNSLRPEDTAIYYCSAHGGESDVWGQGTTVTVSSASGGGGSGGRASGGGGS |
| | | EIVLTQSPGTLSLSPGERATLSCRASQSVGSTNLAWYQQKPGQAPRLLIYD |
| | | ASNRATGIPDRFSGGGSGTDFTLTISRLEPEDFAVYYCQQYGSSPPWTFGQ |
| | | GTKVEIKTTTPAPRPPTPAPTIASQPLSLRPEACRPAAGGAVHTRGLDFAC |
| | | DIYIWAPLAGTCGVLLLSLVITLYCKRGRKKLLYIFKQPFMRPVQTTQEED |
| | | GCSCRFPEEEEGGCELRVKFSRSADAPAYKQGQNQLYNELNLGRREEYDVL |
| | | DKRRGRDPEMGGKPRRKNPQEGLYNELQKDKMAEAYSEIGMKGERRRGKGH |
| | | DGLYQGLSTATKDTYDALHMQALPPR |
| 139107-nt | 972 | ATGGCCCTCCCTGTCACCGCCCTGCTGCTTCCGCTGGCTCTTCTGCTCCAC |
| Full CAR | | GCCGCTCGGCCCGAAGTGCAATTGGTGGAGACTGGAGGAGGAGTGGTGCAA |
| | | CCTGGAGGAAGCCTGAGACTGTCATGCGCGGTGTCGGGCTTCGCCCTCTCC |
| | | AACCACGGAATGTCCTGGGTCCGCCGGGCCCCTGGGAAAGGACTTGAATGG |
| | | GTGTCCGGCATCGTGTACTCGGGTTCCACCTACTACGCGGCCTCAGTGAAG |
| | | GGCCGGTTTACTATTAGCCGCGACAACTCCAGAAACACACTGTACCTCCAA |
| | | ATGAACTCGCTGCGGCCGGAAGATACCGCTATCTACTACTGCTCCGCCCAT |
| | | GGGGGAGAGTCGGACGTCTGGGGACAGGGCACCACTGTCACTGTGTCCAGC |
| | | GCTTCCGGCGGTGGTGGAAGCGGGGGACGGGCCTCAGGAGGCGGTGGCAGC |
| | | GAGATTGTGCTGACCCAGTCCCCCGGGACCCTGAGCCTGTCCCCGGGAGAA |
| | | AGGGCCACCCTCTCCTGTCGGGCATCCCAGTCCGTGGGGTCTACTAACCTT |
| | | GCATGGTACCAGCAGAAGCCCGGCCAGGCCCCTCGCCTGCTGATCTACGAC |
| | | GCGTCCAATAGAGCCACCGGCATCCCGGATCGCTTCAGCGGAGGCGGATCG |
| | | GGCACCGACTTCACCCTCACCATTTCAAGGCTGGAACCGGAGGACTTCGCC |
| | | GTGTACTACTGCCAGCAGTATGGTTCGTCCCCACCCTGGACGTTCGGCCAG |
| | | GGGACTAAGGTCGAGATCAAGACCACTACCCCAGCACCGAGGCCACCCACC |
| | | CCGGCTCCTACCATCGCCTCCCAGCCTCTGTCCCTGCGTCCGGAGGCATGT |
| | | AGACCCGCAGCTGGTGGGGCCGTGCATACCCGGGGTCTTGACTTCGCCTGC |
| | | GATATCTACATTTGGGCCCCTCTGGCTGGTACTTGCGGGGTCCTGCTGCTT |
| | | TCACTCGTGATCACTCTTTACTGTAAGCGCGGTCGGAAGAAGCTGCTGTAC |
| | | ATCTTTAAGCAACCCTTCATGAGGCCTGTGCAGACTACTCAAGAGGAGGAC |
| | | GGCTGTTCATGCCGGTTCCCAGAGGAGGAGGAAGGCGGCTGCGAACTGCGC |
| | | GTGAAATTCAGCCGCAGCGCAGATGCTCCAGCCTACAAGCAGGGGCAGAAC |
| | | CAGCTCTACAACGAACTCAATCTTGGTCGGAGAGAGGAGTACGACGTGCTG |
| | | GACAAGCGGAGAGGACGGGACCCAGAAATGGGCGGGAAGCCGCGCAGAAAG |
| | | AATCCCCAAGAGGGCCTGTACAACGAGCTCCAAAAGGATAAGATGGCAGAA |
| | | GCCTATAGCGAGATTGGTATGAAAGGGGAACGCAGAAGAGGCAAAGGCCAC |
| | | GACGGACTGTACCAGGGACTCAGCACCGCCACCAAGGACACCTATGACGCT |
| | | CTTCACATGCAGGCCCTGCCGCCTCGG |

139108

| | | |
|---|---|---|
| 139108-aa | 958 | MALPVTALLLPLALLLHAARPQVQLVESGGGLVKPGGSLRLSCAASGFTFS |
| Full CAR | | DYYMSWIRQAPGKGLEWVSYISSSGSTIYYADSVKGRFTISRDNAKNSLYL |
| | | QMNSLRAEDTAVYYCARESGDGMDVWGQGTTVTVSSASGGGGSGGRASGGG |
| | | GSDIQMTQSPSSLSASVGDRVTITCRASQSISSYLNWYQQKPGKAPKLLIY |
| | | AASSLQSGVPSRFSGSGSGTDFTLTISSLQPEDFATYYCQQSYTLAFGQGT |
| | | KVDIKTTTPAPRPPTPAPTIASQPLSLRPEACRPAAGGAVHTRGLDFACDI |
| | | YIWAPLAGTCGVLLLSVLITLYCKRGRKKLLYIFKQPFMRPVQTTQEEDGC |
| | | SCRFPEEEEGGCELRVKFSRSADAPAYKQGQNQLYNELNLGRREEYDVLDK |
| | | RRGRDPEMGGKPRRKNPQEGLYNELQKDKMAEAYSIEGMKGERRRGHGHDG |
| | | LYQGLSTATDKTYDALHMQALPPR |
| 139108-nt | 973 | ATGGCCCTCCCTGTCACCGCCCTGCTGCTTCCGCTGGCTCTTCTGCTCCAC |
| Full CAR | | GCCGCTCGGCCCCAAGTGCAACTCGTGGAATCTGGTGGAGGACTCGTGAAA |
| | | CCTGGAGGATCATTGAGACTGTCATGCGCGGCCTCGGGATTCACGTTCTCC |
| | | GATTACTACATGAGCTGGATTCGCCAGGCTCCGGGGAAGGGACTGGAATGG |
| | | GTGTCCTACATTTCCTCATCCGGCTCCACCATCTACTACGCGGACTCCGTG |
| | | AAGGGGAGATTCACCATTAGCCGCGATAACGCCAAGAACAGCCTGTACCTT |
| | | CAGATGAACTCCCTGCGGGCTGAAGATACTGCCGTCTACTACTGCGCAAGG |
| | | GAGAGCGGAGATGGGATGGACGTCTGGGGACAGGGTACCACTGTGACCGTG |
| | | TCGTCGGCCTCCGGCGGAGGGGGTTCGGGTGGAAGGGCCAGCGGCGGCGGA |
| | | GGCAGCGACATCCAGATGACCCAGTCCCCCTCATCGCTGTCCGCCTCCGTG |
| | | GGCGACCGCGTCACCATCACATGCCGGGCCTCACAGTCGATCTCCTCCTAC |
| | | CTCAATTGGTATCAGCAGAAGCCCGGAAAGGCCCCTAAGCTTCTGATCTAC |
| | | GCAGCGTCCTCCCTGCAATCCGGGGTCCCATCTCGGTTCTCCGGCTCGGGC |
| | | AGCGGTACCGACTTCACTCTGACCATCTCGAGCCTGCAGCCGGAGGACTTC |
| | | GCCACTTACTACTGTCAGCAAAGCTACACCCTCGCGTTTGGCCAGGGCACC |
| | | AAAGTGGACATCAAGACCACTACCCCAGCACCGAGGCCACCCACCCCGGCT |
| | | CCTACCATCGCCTCCCAGCCTCTGTCCCTGCGTCCGGAGGCATGTAGACCC |
| | | GCAGCTGGTGGGGCCGTGCATACCCGGGGTCTTGACTTCGCCTGCGATATC |
| | | TACATTTGGGCCCCTCTGGCTGGTACTTGCGGGGTCCTGCTGCTTTCACTC |
| | | GTGATCACTCTTTACTGTAAGCGCGGTCGGAAGAAGCTGCTGTACATCTTT |
| | | AAGCAACCCTTCATGAGGCCTGTGCAGACTACTCAAGAGGAGGACGGCTGT |
| | | TCATGCCGGTTCCCAGAGGAGGAGGAAGGCGGCTGCGAACTGCGCGTGAAA |
| | | TTCAGCCGCAGCGCAGATGCTCCAGCCTACAAGCAGGGGCAGAACCAGCTC |
| | | TACAACGAACTCAATCTTGGTCGGAGAGAGGAGTACGACGTGCTGGACAAG |
| | | CGGAGAGGACGGGACCCAGAAATGGGCGGGAAGCCGCGCAGAAAGAATCCC |
| | | CAAGAGGGCCTGTACAACGAGCTCCAAAAGGATAAGATGGCAGAAGCCTAT |
| | | AGCGAGATTGGTATGAAAGGGGAACGCAGAAGAGGCAAAGGCCACGACGGA |
| | | CTGTACCAGGGACTCAGCACCGCCACCAAGGACACCTATGACGCTCTTCAC |
| | | ATGCAGGCCCTGCCGCCTCGG |

139110

| | | |
|---|---|---|
| 139110-aa | 960 | MALPVTALLLPLALLLHAARPQVQLVQSGGGLVKPGGSLRLSCAASGFTFS |
| Full CAR | | DYYMSWIRQPAGKGLEWVSYISSSGNTIYYADSVKGRFTISRDNAKNSLYL |
| | | QMNSLRAEDTAVYYCARSTMVREDYWGQGTLVTVSSASGGGGSGGRASGGG |
| | | GSDIVLTQSPLSLPVTLGQPASISCKSSESLVHNSGKTYLNWFHQRPGQSP |
| | | RRLIYEVSNRDSGVPDRFTGSGSGTDFTLKISRVEAEDVGVYYCMQGTHWP |
| | | GTFGQGTKLEIKTTTPAPRPPTPAPTIASQPLSLRPEACRPAAGGAVHTRG |
| | | LDFACDIYIWAPLAGTCGVLLLSLVITLYCKRGRKKLLYIFKQPFMRPVQT |
| | | TQEEDGCSCRFPEEEEGGCELRVKFSRSADAPAYKQGQNQLYNELNLGRRE |
| | | EYDVLDKRRGRDPEMGGKPRRKNPQEGLYNELQKDKMAEAYSEIGMKGERR |
| | | AGKGHDGLYQGLSTATKDTYDALHMQALPPR |
| 139110-nt | 975 | ATGGCCCTCCCTGTCACCGCCCTGCTGCTTCCGCTGGCTCTTCTGCTCCAC |
| Full CAR | | GCCGCTCGGCCCCAAGTGCAACTGGTGCAAAGCGGAGGAGGATTGGTCAAA |
| | | CCCGGAGGAAGCCTGAGACTGTCATGCGCGGCCTCTGGATTCACCTTCTCC |
| | | GATTACTACATGTCATGGATCAGACAGGCCCCGGGGAAGGGCCTCGAATGG |
| | | GTGTCCTACATCTCGTCCTCCGGGAACACCATCTACTACGCCGACAGCGTG |
| | | AAGGGCCGCTTTACCATTTCCCGCGACAACGCAAAGAACTCGCTGTACCTT |
| | | CAGATGAATTCCCTGCGGGCTGAAGATACCGCGGTGTACTATTGCGCCCGG |
| | | TCCACTATGGTCCGGGAGGACTACTGGGGACAGGGCACACTCGTGACCGTG |
| | | TCCAGCGCGAGCGGGGGTGGAGGCAGCGGTGGACGCGCCTCCGGCGGCGGC |
| | | GGTTCAGACATCGTGCTGACTCAGTCGCCCCTGTCGCTGCCGGTCACCCTG |
| | | GGCCAACCGGCCTCAATTAGCTGCAAGTCCTCGGAGAGCCTGGTGCACAAC |
| | | TCAGGAAAGACTTACCTGAACTGGTTCCATCAGCGGCCTGGACAGTCCCCA |
| | | CGGAGGCTCATCTATGAAGTGTCCAACAGGGATTCGGGGGTGCCCGACCGC |
| | | TTCACTGGCTCCGGGTCCGGCACCGACTTCACCTTGAAAATCTCCAGAGTG |
| | | GAAGCCGAGGACGTGGGCGTGTACTACTGTATGCAGGGTACCCACTGGCCT |
| | | GGAACCTTTGGACAAGGAACTAAGCTCGAGATTAAGACCACTACCCCAGCA |
| | | CCGAGGCCACCCACCCCGGCTCCTACCATCGCCTCCCAGCCTCTGTCCCTG |
| | | CGTCCGGAGGCATGTAGACCCGCAGCTGGTGGGGCCGTGCATACCCGGGGT |
| | | CTTGACTTCGCCTGCGATATCTACATTTGGGCCCCTCTGGCTGGTACTTGC |
| | | GGGGTCCTGCTGCTTTCACTCGTGATCACTCTTTACTGTAAGCGCGGTCGG |
| | | AAGAAGCTGCTGTACATCTTTAAGCAACCCTTCATGAGGCCTGTGCAGACT |
| | | ACTCAAGAGGAGGACGGCTGTTCATGCCGGTTCCCAGAGGAGGAGGAAGGC |
| | | GGCTGCGAACTGCGCGTGAAATTCAGCCGCAGCGCAGATGCTCCAGCCTAC |
| | | AAGCAGGGGCAGAACCAGCTCTACAACGAACTCAATCTTGGTCGGAGAGAG |
| | | GAGTACGACGTGCTGGACAAGCGGAGAGGACGGGACCCAGAAATGGGCGGG |
| | | AAGCCGCGCAGAAAGAATCCCCAAGAGGGCCTGTACAACGAGCTCCAAAAG |
| | | GATAAGATGGCAGAAGCCTATAGCGAGATTGGTATGAAAGGGGAACGCAGA |
| | | AGAGGCAAAGGCCACGACGGACTGTACCAGGGACTCAGCACCGCCACCAAG |
| | | GACACCTATGACGCTCTTCACATGCAGGCCCTGCCGCCTCGG |

139112

| | | |
|---|---|---|
| 139112-aa | 961 | MALPVTALLLPLALLLHAARPQVQLVESGGGLVQPGGSLRLSCAVSGFALS |
| Full CAR | | NHGMSWVRRAPGKGLEWVSGIVYSGSTYYAASVKGRFTISRDNSRNTLYLQ |
| | | MNSLRPEDTAIYYCSAHGGESDVWGQGTTVTVSSASGGGGSGGRASGGGGS |
| | | DIRLTQSPSPLSASVGDRVTITCQASEDINKFLNWYHQTPGKAPKLLIYDA |
| | | STLQTGVPSRFSGSGSGTDFTLTINSLQPEDIGTYYCQQYESLPLTFGGGT |
| | | KVEIKTTTPAPRPPTPAPTIASQPLSLRPEACRPAAGGAVHTRGLDFACDI |
| | | YIWAPLAGTCGVLLLSLVITLYCKRGRKKLLYIFKQPFMRPVQTTQEEDGC |
| | | SCRFPEEEEGGCELRVKFSRSADAPAYKQGQNQLYNELNLGRREEYDVLDK |
| | | RRGRDPEMGGKPRRKNPQEGLYNELQKDKMAEAYSEIGMKGERRRGKGHDG |
| | | LYQGLSTATKDTYDALHMQALPPR |
| 139112-nt | 976 | ATGGCCCTCCCTGTCACCGCCCTGCTGCTTCCGCTGGCTCTTCTGCTCCAC |
| Full CAR | | GCCGCTCGGCCCCAAGTGCAACTCGTGGAATCTGGTGGAGGACTCGTGCAA |
| | | CCCGGTGGAAGCCTTAGGCTGTCGTGCGCCGTCAGCGGGTTTGCTCTGAGC |
| | | AACCATGGAATGTCCTGGGTCCGCCGGGCACCGGGAAAAGGGCTGGAATGG |
| | | GTGTCCGGCATCGTGTACAGCGGGTCAACCTATTACGCCGCGTCCGTGAAG |
| | | GGCAGATTCACTATCTCAAGAGACAACAGCCGGAACACCCTGTACTTGCAA |
| | | ATGAATTCCCTGCGCCCCGAGGACACCGCCATCTACTACTGCTCCGCCCAC |
| | | GGAGGAGAGTCGGACGTGTGGGGCCAGGGAACGACTGTGACTGTGTCCAGC |
| | | GCATCAGGAGGGGGTGGTTCGGGCGGCCGGGCCTCGGGGGGAGGAGGTTCC |
| | | GACATTCGGCTGACCCAGTCCCCGTCCCCACTGTCGGCCTCCGTCGGCGAC |
| | | CGCGTGACCATCACTTGTCAGGCGTCCGAGGACATTAACAAGTTCCTGAAC |
| | | TGGTACCACCAGACCCCTGGAAAGGCCCCCAAGCTGCTGATCTACGATGCC |
| | | TCGACCCTTCAAACTGGAGTGCCTAGCCGGTTCTCCGGGTCCGGCTCCGGC |
| | | ACTGATTTCACTCTGACCATCAACTCATTGCAGCCGGAAGATATCGGGACC |
| | | TACTATTGCCAGCAGTACGAATCCCTCCCGCTCACATTCGGCGGGGGAACC |
| | | AAGGTCGAGATTAAGACCACTACCCCAGCACCGAGGCCACCCACCCCGGCT |
| | | CCTACCATCGCCTCCCAGCCTCTGTCCCTGCGTCCGGAGGCATGTAGACCC |
| | | GCAGCTGGTGGGGCCGTGCATACCCGGGGTCTTGACTTCGCCTGCGATATC |
| | | TACATTTGGGCCCCTCTGGCTGGTACTTGCGGGGTCCTGCTGCTTTCACTC |
| | | GTGATCACTCTTTACTGTAAGCGCGGTCGGAAGAAGCTGCTGTACATCTTT |
| | | AAGCAACCCTTCATGAGGCCTGTGCAGACTACTCAAGAGGAGGACGGCTGT |
| | | TCATGCCGGTTCCCAGAGGAGGAGGAAGGCGGCTGCGAACTGCGCGTGAAA |
| | | TTCAGCCGCAGCGCAGATGCTCCAGCCTACAAGCAGGGGCAGAACCAGCTC |
| | | TACAACGAACTCAATCTTGGTCGGAGAGAGGAGTACGACGTGCTGGACAAG |
| | | CGGAGAGGACGGGACCCAGAAATGGGCGGGAAGCCGCGCAGAAAGAATCCC |
| | | CAAGAGGGCCTGTACAACGAGCTCCAAAAGGATAAGATGGCAGAAGCCTAT |
| | | AGCGAGATTGGTATGAAAGGGGAACGCAGAAGAGGCAAAGGCCACGACGGA |
| | | CTGTACCAGGGACTCAGCACCGCCACCAAGGACACCTATGACGCTCTTCAC |
| | | ATGCAGGCCCTGCCGCCTCGG |

139113

| | | |
|---|---|---|
| 139113-aa | 962 | MALPVTALLLPLALLLHAARPEVQLVETGGGLVQPGGSLRLSCAVSGFALS |
| Full CAR | | NHGMSWVRRAPGKGLEWVSGIVYSGSTYYAASVKGRFTISRDNSRNTLYLQ |
| | | MNSLRPEDTAIYYCSAHGGESDVWGQGTTVTVSSASGGGGSGGRASGGGGS |
| | | ETTLTQSPATLSVSPGERATLSCRASQSVGSNLAWYQQKPGQGPRLLIYGA |
| | | STRATGIPARFSGSGSGTEFTLTISSLQPEDFAVYYCQQYNDWLPVTFGQG |
| | | TKVEIKTTTPAPRPPTPAPTIASQPLSLRPEACRPAAGGAVHTRGLDFACD |
| | | IYIWAPLAGTCGVLLLSLVITLYCKRGRKKLLYIFKQPFMRPVQTTQEEDG |
| | | CSCRFPEEEEGGCELRVKFSRSADAPAYKQGQNQLYNELNLGRREEYDVLD |
| | | KRRGRDPEMGGKPRRKNPQEGLYNELQKDKMAEAYSEIGMKGERRRKGGHD |
| | | GLYQGLSTATKDTYDALHMQALPPR |
| 139113-nt | 977 | ATGGCCCTCCCTGTCACCGCCCTGCTGCTTCCGCTGGCTCTTCTGCTCCAC |
| Full CAR | | GCCGCTCGGCCCGAAGTGCAATTGGTGGAAACTGGAGGAGGACTTGTGCAA |
| | | CCTGGAGGATCATTGCGGCTCTCATGCGCTGTCTCCGGCTTCGCCCTGTCA |
| | | AATCACGGGATGTCGTGGGTCAGACGGGCCCCGGGAAAGGGTCTGGAATGG |
| | | GTGTCGGGGATTGTGTACAGCGGCTCCACCTACTACGCCGCTTCGGTCAAG |
| | | GGCCGCTTCACTATTTCACGGGACAACAGCCGCAACACCCTCTATCTGCAA |
| | | ATGAACTCTCTCCGCCCGGAGGATACCGCCATCTACTACTGCTCCGCACAC |
| | | GGCGGCGAATCCGACGTGTGGGGACAGGGAACCACTGTCACCGTGTCGTCC |
| | | GCATCCGGTGGCGGAGGATCGGGTGGCCGGGCCTCCGGGGGCGGCGGCAGC |
| | | GAGACTACCCTGACCCAGTCCCCTGCCACTCTGTCCGTGAGCCCGGGAGAG |
| | | AGAGCCACCCTTAGCTGCCGGGCCAGCCAGAGCGTGGGCTCCAACCTGGCC |
| | | TGGTACCAGCAGAAGCCAGGACAGGGTCCCAGCCTGCTGATCTACGGAGCC |
| | | TCCACTCGCGCGACCGGCATCCCCGCGAGGTTCTCCGGGTCGGGTTCCGGG |
| | | ACCGAGTTCACCCTGACCATCTCCTCCCTCCAACCGGAGGACTTCGCGGTG |
| | | TACTACTGTCAGCAGTACAACGATTGGCTGCCCGTGACATTTGGACAGGGG |
| | | ACGAAGGTGGAAATCAAAACCACTACCCCAGCACCGAGGCCACCCACCCCG |
| | | GCTCCTACCATCGCCTCCCAGCCTCTGTCCCTGCGTCCGGAGGCATGTAGA |
| | | CCCGCAGCTGGTGGGGCCGTGCATACCCGGGGTCTTGACTTCGCCTGCGAT |
| | | ATCTACATTTGGGCCCCTCTGGCTGGTACTTGCGGGGTCCTGCTGCTTTCA |
| | | CTCGTGATCACTCTTTACTGTAAGCGCGGTCGGAAGAAGCTGCTGTACATC |
| | | TTTAAGCAACCCTTCATGAGGCCTGTGCAGACTACTCAAGAGGAGGACGGC |
| | | TGTTCATGCCGGTTCCCAGAGGAGGAGGAAGGCGGCTGCGAACTGCGCGTG |
| | | AAATTCAGCCGCAGCGCAGATGCTCCAGCCTACAAGCAGGGGCAGAACCAG |
| | | CTCTACAACGAACTCAATCTTGGTCGGAGAGAGGAGTACGACGTGCTGGAC |
| | | AAGCGGAGAGGACGGGACCCAGAAATGGGCGGGAAGCCGCGCAGAAAGAAT |
| | | CCCCAAGAGGGCCTGTACAACGAGCTCCAAAAGGATAAGATGGCAGAAGCC |
| | | TATAGCGAGATTGGTATGAAAGGGGAACGCAGAAGAGGCAAAGGCCACGAC |
| | | GGACTGTACCAGGGACTCAGCACCGCCACCAAGGACACCTATGACGCTCTT |
| | | CACATGCAGGCCCTGCCGCCTCGG |

139114

| | | |
|---|---|---|
| 139114-aa | 963 | MALPVTALLLPLALLLHAARPEVQLVESGGGLVQPGGSLRLSCAVSGFALS |
| Full CAR | | NHGMSWVRRAPGKGLEWVSGIVYSGSTYYAASVKGRFTISRDNSRNTLYLQ |
| | | MNSLRPEDTAIYYCSAHGGESDVWGQGTTVTVSSASGGGGSGGRASGGGGS |
| | | EIVLTQSPGTLSLSPGERATLSCRASQSIGSSSLAWYQQKPGQAPRLLMYG |
| | | ASSRASGIPDRFSGSGSGTDFTLTISRLEPEDFAVYYCQQYAGSPPFTFGQ |
| | | GTKVEIKTTTPAPRPPTPAPTIASQPLSLRPEACRPAAGGAVHTRGLDFAC |
| | | DIYIWAPLAGTCGVLLLSLVITLYCKRGRKKLLYIFKQPFMRPVQTTQEED |
| | | GCSCRFPEEEEGGCELRVKFSRSADAPAYKQGQNQLYNELNLGRREEYDVL |
| | | DKRRGRDPEMGGKPRRKNPQEGLYNELQKDKMAEAYSEIGMKGERRRGKGH |
| | | DGLYQGLSTATKDTYDALHMQALPPR |
| 139114-nt | 978 | ATGGCCCTCCCTGTCACCGCCCTGCTGCTTCCGCTGGCTCTTCTGCTCCAC |
| Full CAR | | GCCGCTCGGCCCGAAGTGCAATTGGTGGAATCTGGTGGAGGACTTGTGCAA |
| | | CCTGGAGGATCACTGAGACTGTCATGCGCGGTGTCCGGTTTTGCCCTGAGC |
| | | AATCATGGGATGTCGTGGGTCCGGCGCGCCCCCGGAAAGGGTCTGGAATGG |
| | | GTGTCGGGTATCGTCTACTCCGGGAGCACTTACTACGCCGCGAGCGTGAAG |
| | | GGCCGCTTCACCATTTCCCGCGATAACTCCCGCAACACCCTGTACTTGCAA |
| | | ATGAACTCGCTCCGGCCTGAGGACACTGCCATCTACTACTGCTCCGCACAC |
| | | GGAGGAGAATCCGACGTGTGGGGCCAGGGAACTACCGTGACCGTCAGCAGC |
| | | GCCTCCGGCGGCGGGGGCTCAGGCGGACGGGCTAGCGGCGGCGGTGGCTCC |
| | | GAGATCGTGCTGACCCAGTCGCCTGGCACTCTCTCGCTGAGCCCCGGGGAA |
| | | AGGGCAACCCTGTCCTGTCGGGCCAGCCAGTCCATTGGATCATCCTCCCTC |
| | | GCCTGGTATCAGCAGAAACCGGGACAGGCTCCGCGGCTGCTTATGTATGGG |
| | | GCCAGCTCAAGAGCCTCCGGCATTCCCGACCGGTTCTCCGGGTCCGGTTCC |
| | | GGCACCGATTTCACCCTGACTATCTCGAGGCTGGAGCCAGAGGACTTCGCC |
| | | GTGTACTACTGCCAGCAGTACGCGGGGTCCCCGCCGTTCACGTTCGGACAG |
| | | GGAACCAAGGTCGAGATCAAGACCACTACCCCAGCACCGAGGCCACCCACC |
| | | CCGGCTCCTACCATCGCCTCCCAGCCTCTGTCCCTGCGTCCGGAGGCATGT |
| | | AGACCCGCAGCTGGTGGGGCCGTGCATACCCGGGGTCTTGACTTCGCCTGC |
| | | GATATCTACATTTGGGCCCCTCTGGCTGGTACTTGCGGGGTCCTGCTGCTT |
| | | TCACTCGTGATCACTCTTTACTGTAAGCGCGGTCGGAAGAAGCTGCTGTAC |
| | | ATCTTTAAGCAACCCTTCATGAGGCCTGTGCAGACTACTCAAGAGGAGGAC |
| | | GGCTGTTCATGCCGGTTCCCAGAGGAGGAGGAAGGCGGCTGCGAACTGCGC |
| | | GTGAAATTCAGCCGCAGCGCAGATGCTCCAGCCTACAAGCAGGGGCAGAAC |
| | | CAGCTCTACAACGAACTCAATCTTGGTCGGAGAGAGGAGTACGACGTGCTG |
| | | GACAAGCGGAGAGGACGGGACCCAGAAATGGGCGGGAAGCCGCGCAGAAAG |
| | | AATCCCCAAGAGGGCCTGTACAACGAGCTCCAAAAGGATAAGATGGCAGAA |
| | | GCCTATAGCGAGATTGGTATGAAAGGGGAACGCAGAAGAGGCAAAGGCCAC |
| | | GACGGACTGTACCAGGGACTCAGCACCGCCACCAAGGACACCTATGACGCT |
| | | CTTCACATGCAGGCCCTGCCGCCTCGG |

149362

| | | |
|---|---|---|
| 149362-aa | 979 | MALPVTALLLPLALLLHAARPQVQLQESGPGLVKPSETLSLTCTVSGGSIS |
| Full CAR | | SSYYYWGQIRQPPGKGLEWIGSIYYSGSAYYNPSLKSRVTISVDTSKNQFS |
| | | LRLSSVTAADTAVYYCARHWQEWPDAFDIWGQGTMVTVSSGGGGSGGGGSG |
| | | GGGSETTLTQSPAFMSATPGDKVIISCKASQDIDDAMNWYQQKPGEAPLFI |
| | | IQSATSPVPGIPPRFSGSGFGTDFSLTINNIESEDAAYYFCLQHDNFPLTF |
| | | GQGTKLEIKTTTPAPRPPTPAPTIASQPLSLRPEACRPAAGGAVHTRGLDF |
| | | ACDIYIWAPLAGTCGVLLLSLVITLYCKRGRKKLLYIFKQPFMRPVQTTQE |
| | | EDGCSCRFPEEEEGGCELRVKFSRSADAPAYKQGQNQLYNELNLGRREEYD |
| | | VLDKRRGRDPEMGGKPRRKNPQEGLYNELQKDKMAEAYSEIGMKGERRRGK |
| | | GHDGLYQGLSTATKDTYDALHMQALPPR |
| 149362-nt | 1001 | ATGGCCCTCCCTGTCACCGCCCTGCTGCTTCCGCTGGCTCTTCTGCTCCAC |
| Full CAR | | GCCGCTCGGCCCCAAGTGCAGCTTCAGGAAAGCGGACCGGGCCTGGTCAAG |
| | | CCATCCGAAACTCTCTCCCTGACTTGCACTGTGTCTGGCGGTTCCATCTCA |
| | | TCGTCGTACTACTACTGGGGCTGGATTAGGCAGCCGCCCGGAAAGGGACTG |
| | | GAGTGGATCGGAAGCATCTACTATTCCGGCTCGGCGTACTACAACCCTAGC |
| | | CTCAAGTCGAGAGTGCACCATCTCCGTGGATACCTCCAAGAACCAGTTTCC |
| | | CTGCGCCTGAGCTCCGTGACCGCCGCTGACACCGCCGTGTACTACTGTGCT |
| | | CGGCATTGGCAGGAATGGCCCGATGCCTTCGACATTTGGGGCCAGGGCACT |
| | | ATGGTCACTGTGTCATCCGGGGGTGGAGGCAGCGGGGGAGGAGGGTCCGGG |
| | | GGGGGAGGTTCAGAGACAACCTTGACCCAGTCACCCGCATTCATGTCCGCC |
| | | ACTCCGGGAGACAAGGTCATCATCTCGTGCAAAGCGTCCCAGGATATCGAC |
| | | GATGCCATGAATTGGTACCAGCAGAAGCCTGGCGAAGCGCCGCTGTTCATT |
| | | ATCCAATCCGCAACCTCGCCCGTGCCTGGAATCCCACCGCGGTTCAGCGGC |
| | | AGCGGTTTCGGAACCGACTTTTCCCTGACCATTAACAACATTGAGTCCGAG |
| | | GACGCCGCCTACTACTTCTGCCTGCAACACGACAACTTCCCTCTCACGTTC |
| | | GGCCAGGGAACCAAGCTGGAAATCAAGACCACTACCCCAGCACCGAGGCCA |
| | | CCCACCCCGGCTCCTACCATCGCCTCCCAGCCTCTGTCCCTGCGTCCGGAG |
| | | GCATGTAGACCCGCAGCTGGTGGGGCCGTGCATACCCGGGGTCTTGACTTC |
| | | GCCTGCGATATCTACATTTGGGCCCCTCTGGCTGGTACTTGCGGGGTCCTG |
| | | CTGCTTTCACTCGTGATCACTCTTTACTGTAAGCGCGGTCGGAAGAAGCTG |
| | | CTGTACATCTTTAAGCAACCCTTCATGAGGCCTGTGCAGACTACTCAAGAG |
| | | GAGGACGGCTGTTCATGCCGGTTCCCAGAGGAGGAGGAAGGCGGCTGCGAA |
| | | CTGCGCGTGAAATTCAGCCGCAGCGCAGATGCTCCAGCCTACAAGCAGGGG |
| | | CAGAACCAGCTCTACAACGAACTCAATCTTGGTCGGAGAGAGGAGTACGAC |
| | | GTGCTGGACAAGCGGAGAGGACGGGACCCAGAAATGGGCGGGAAGCCGCGC |
| | | AGAAAGAATCCCCAAGAGGGCCTGTACAACGAGCTCCAAAAGGATAAGATG |
| | | GCAGAAGCCTATAGCGAGATTGGTATGAAAGGGGAACGCAGAAGAGGCAAA |
| | | GGCCACGACGGACTGTACCAGGGACTCAGCACCGCCACCAAGGACACCTAT |
| | | GACGCTCTTCACATGCAGGCCCTGCCGCCTCGG |

149363

| | | |
|---|---|---|
| 149363-aa | 980 | MALPVTALLLPLALLLHAARPQVNLRESGPALVKPTQTLTLTCTFSGFSLR |
| Full CAR | | TSGMCVSWIRQPPGKALEWLARIDWDEDKFYSTSLKTRLTISKDTSDVQVV |
| | | LRMTNMDPADTATYYCARSGAGGTSATAFDIWGPGTMVTVSSGGGGSGGGG |
| | | SGGGGSDIQMTQSPSSLSASVGDRVTITCRASQDIYNNLAWFQLKPGSAPR |
| | | SLMYAANKSQSGVPSRFSGSASGTDFTLTISSLQPEDFATYYCQHYYRFPY |
| | | SFGQGTKLEIKTTTPAPRPPTPAPTIASQPLSLRPEACRPAAGGAVHTRGL |
| | | DFACDIYIWAPLAGTCGVLLLSLVITLYCKRGRKKLLYIFKQPFMRPVQTT |
| | | QEEDGCSCRFPEEEEGGCELRVKFSRSADAPAYKQGQNQLYNELNLGRREE |
| | | YDVLDKRRGRDPEMGGKPRRKNPQEGLYNELQKDKMAEAYSEIGMKGERRR |
| | | GKGHDGLYQGLSTATKDTYDALHMQALPPR |
| 149363-nt | 1002 | ATGGCCCTCCCTGTCACCGCCCTGCTGCTTCCGCTGGCTCTTCTGCTCCAC |
| Full CAR | | GCCGCTCGGCCCCAAGTCAATCTGCGCGAATCCGGCCCCGCCTTGGTCAAG |
| | | CCTACCCAGACCCTCACTCTGACCTGTACTTTCTCCGGCTTCTCCCTGCGG |
| | | ACTTCCGGGATGTGCGTGTCCTGGATCAGACAGCCTCCGGGAAAGGCCCTG |
| | | GAGTGGCTCGCTCGCATTGACTGGGATGAGGACAAGTTCTACTCCACCTCA |
| | | CTCAAGACCAGGCTGACCATCAGCAAAGATACCTCTGACAACCAAGTGGTG |
| | | CTCCGCATGACCAACATGGACCCAGCCGACACTGCCACTTACTACTGCGCG |
| | | AGGAGCGGAGCGGGCGGAACCTCCGCCACCGCCTTCGATATTTGGGGCCCG |
| | | GGTACCATGGTCACCGTGTCAAGCGGAGGAGGGGGGTCCGGGGGCGGCGGT |
| | | TCCGGGGGAGGCGGATCGGACATTCAGATGACTCAGTCACCATCGTCCCTG |
| | | AGCGCTAGCGTGGGCGACAGAGTGACAATCACTTGCCGGGCATCCCAGGAC |
| | | ATCTATAACAACCTTGCGTGGTTCCAGCTGAAGCCTGGTTCCGCACCGCGG |
| | | TCACTTATGTACGCCGCCAACAAGAGCCAGTCGGGAGTGCCGTGCCCGGTT |
| | | TCCGGTTCGGCCTCGGGAACTGACTTCACCCTGACGATCTCCAGCCTGCAA |
| | | CCCGAGGATTTCGCCACCTACTACTGCCAGCACTACTACCGCTTTCCCTAC |
| | | TCGTTCGGACAGGGAACCAAGCTGGAAATCAAGACCACTACCCCAGCACCG |
| | | AGGCCACCCACCCCGGCTCCTACCATCGCCTCCCAGCCTCTGTCCCTGCGT |
| | | CCGGAGGCATGTAGACCCGCAGCTGGTGGGGCCGTGCATACCCGGGGTCTT |
| | | GACTTCGCCTGCGATATCTACATTTGGGCCCCTCTGGCTGGTACTTGCGGG |
| | | GTCCTGCTGCTTTCACTCGTGATCACTCTTTACTGTAAGCGCGGTCGGAAG |
| | | AAGCTGCTGTACATCTTTAAGCAACCCTTCATGAGGCCTGTGCAGACTACT |
| | | CAAGAGGAGGACGGCTGTTCATGCCGGTTCCCAGAGGAGGAGGAAGGCGGC |
| | | TGCGAACTGCGCGTGAAATTCAGCCGCAGCGCAGATGCTCCAGCCTACAAG |
| | | CAGGGGCAGAACCAGCTCTACAACGAACTCAATCTTGGTCGGAGAGAGGAG |
| | | TACGACGTGCTGGACAAGCGGAGAGGACGGGACCCAGAAATGGGCGGGAAG |
| | | CCGCGCAGAAAGAATCCCCAAGAGGGCCTGTACAACGAGCTCCAAAAGGAT |
| | | AAGATGGCAGAAGCCTATAGCGAGATTGGTATGAAAGGGGAACGCAGAAGA |
| | | GGCAAAGGCCACGACGGACTGTACCAGGGACTCAGCACCGCCACCAAGGAC |
| | | ACCTATGACGCTCTTCACATGCAGGCCCTGCCGCCTCGG |

149364

| | | |
|---|---|---|
| 149364-aa | 981 | MALPVTALLLPLALLLHAARPEVQLVESGGGLVKPGGSLRLSCAASGFTFS |
| Full CAR | | SYSMNWVRQAPGKGLEWVSSISSSSSYIYYADSVKGRFTISRDNAKNSLYL |
| | | QMNSLRAEDTAVYYCAKTIAAVYAFDIWGQGTTVTVSSGGGGSGGGGSGGG |
| | | GSEIVLTQSPLSLPVTPEEPASISCRSSQSLLHSNGYNYLDWYLQKPGQSP |
| | | QLLIYLGSNRASGVPDRFSGSGSGTDFTLKISRVEAEDVGVYYCMQALQTP |
| | | YTFGQGTKLEIKTTTPAPRPPTPAPTIASQPLSLRPEACRPAAGGAVHTRG |
| | | LDFACDIYIWAPLAGTCGVLLLSLVITLYCKRGRKKLLYIFKQPFMRPVQT |
| | | TQEEDGCSCRFPEEEEGGCELRVKFSRSADAPAYKQGQNQLYNELNLGRRE |
| | | EYDVLDKRRGRDPEMGGKPRRKNPQEGLYNELQKDKMAEAYSEIGMKGERR |
| | | RGKGHDGLYQGLSTATKDTYDALHMQALPPR |
| 149364-nt | 1003 | ATGGCCCTCCCTGTCACCGCCCTGCTGCTTCCGCTGGCTCTTCTGCTCCAC |
| Full CAR | | GCCGCTCGGCCCGAAGTGCAGCTTGTCGAATCCGGGGGGGGACTGGTCAAG |
| | | CCGGGCGGATCACTGAGACTGTCCTGCGCCGCGAGCGGCTTCACGTTCTCC |
| | | TCCTACTCCATGAACTGGGTCCGCCAAGCCCCCGGGAAGGGACTGGAATGG |
| | | GTGTCCTCTATCTCCTCGTCGTCGTCCTACATCTACTACGCCGACTCCGTG |
| | | AAGGGAAGATTCACCATTTCCCGCGACAACGCAAAGAACTCACTGTACTTG |
| | | CAAATGAACTCACTCCGGGCCGAAGATACTGCTGTGTACTATTGCGCCAAG |
| | | ACTATTGCCGCCGTCTACGCTTTCGACATCTGGGGCCAGGGAACCACCGTG |
| | | ACTGTGTCGTCCGGTGGTGGTGGCTCGGGCGGAGGAGGAAGCGGCGGCGGG |
| | | GGGTCCGAGATTGTGCTGACCCAGTCGCCACTGAGCCTCCCTGTGACCCCC |
| | | GAGGAACCCGCCAGCATCAGCTGCCGGTCCAGCCAGTCCCTGCTCCACTCC |
| | | AACGGATACAATTACCTCGATTGGTACCTTCAGAAGCCTGGACAAAGCCCG |
| | | CAGCTGCTCATCTACTTGGGATCAAACCGCGCGTCAGGAGTGCCTGACCGG |
| | | TTCTCCGGCTCGGGCAGCGGTACCGATTTCACCCTGAAAATCTCCAGGGTG |
| | | GAGGCAGAGGACGTGGGAGTGTATTACTGTATGCAGGCGCTGCAGACTCCG |
| | | TACACATTTGGGCAGGGCACCAAGCTGGAGATCAAGACCACTACCCCAGCA |
| | | CCGAGGCCACCCACCCCGGCTCCTACCATCGCCTCCCAGCCTCTGTCCCTG |
| | | CGTCCGGAGGCATGTAGACCCGCAGCTGGTGGGGCCGTGCATACCCGGGGT |
| | | CTTGACTTCGCCTGCGATATCTACATTTGGGCCCCTCTGGCTGGTACTTGC |
| | | GGGGTCCTGCTGCTTTCACTCGTGATCACTCTTTACTGTAAGCGCGGTCGG |
| | | AAGAAGCTGCTGTACATCTTTAAGCAACCCTTCATGAGGCCTGTGCAGACT |
| | | ACTCAAGAGGAGGACGGCTGTTCATGCCGGTTCCCAGAGGAGGAGGAAGGC |
| | | GGCTGCGAACTGCGCGTGAAATTCAGCCGCAGCGCAGATGCTCCAGCCTAC |
| | | AAGCAGGGGCAGAACCAGCTCTACAACGAACTCAATCTTGGTCGGAGAGAG |
| | | GAGTACGACGTGCTGGACAAGCGGAGAGGACGGGACCCAGAAATGGGCGGG |
| | | AAGCCGCGCAGAAAGAATCCCCAAGAGGGCCTGTACAACGAGCTCCAAAAG |
| | | GATAAGATGGCAGAAGCCTATAGCGAGATTGGTATGAAAGGGGAACGCAGA |
| | | AGAGGCAAAGGCCACGACGGACTGTACCAGGGACTCAGCACCGCCACCAAG |
| | | GACACCTATGACGCTCTTCACATGCAGGCCCTGCCGCCTCGG |

149365

| | | |
|---|---|---|
| 149365-aa | 982 | MALPVTALLLPLALLLHAARPEVQLVESGGGLVKPGGSLRLSCAASGFTFS |
| Full CAR | | DYYMSWIRQAPGKGLEWVSYISSSGSTIYYADSVKGRFTISRDNAKNSLYL |
| | | QMNSLRAEDTAVYYCARDLRGAFDIWGQGTMVTVSSGGGGSGGGGSGGGGS |
| | | SYVLTQSPSVSAAPGYTATISCGGNNIGTKSVHWYQQKPGQAPLLVIRDDS |
| | | VRPSKIPGRFSGSNSGNMATLTISGVQAGDEADFYCQVWDSDSEHVVFGGG |
| | | TKLTVLTTTPAPRPPTPAPTIASQPLSLRPEACRPAAGGAVHTRGLDFACD |
| | | IYIWAPLAGTCGVLLLSLVITLYCKRGRKKLLYIFKQPFMRPVQTTQEEDG |
| | | CSCRFPEEEEGGCELRVKFSRSADAPAYKQGQNQLYNLENLGRREEYDVLD |
| | | KRRGRDPEMGGKPRRKNPQEGLYNELQKDKMAEAYSEIGMKGERRRGKGHD |
| | | GLYGGLSTATKDTYDALHMQALPPR |
| 149365-nt | 1004 | ATGGCCCTCCCTGTCACCGCCCTGCTGCTTCCGCTGGCTCTTCTGCTCCAC |
| Full CAR | | GCCGCTCGGCCCGAAGTCCAGCTCGTGGAGTCCGGCGGAGGCCTTGTGAAG |
| | | CCTGGAGGTTCGCTGAGACTGTCCTGCGCCGCCTCCGGCTTCACCTTCTCC |
| | | GACTACTACATGTCCTGGATCAGACAGGCCCCGGGAAAGGGCCTGGAATGG |
| | | GTGTCCTACATCTCGTCATCGGGCAGCACTATCTACTACGCGGACTCAGTG |
| | | AAGGGGCGGTTCACCATTTCCCGGGATAACGCGAAGAACTCGCTGTATCTG |
| | | CAAATGAACTCACTGAGGGCCGAGGACACCGCCGTGTACTACTGCGCCCGC |
| | | GATCTCCGCGGGGCATTTGACATCTGGGGACAGGGAACCATGGTCACAGTG |
| | | TCCAGCGGAGGGGGAGGATCGGGTGGCGGAGGTTCCGGGGGTGGAGGCTCC |
| | | TCCTACGTGCTGACTCAGAGCCCAAGCGTCAGCGCTGCGCCCGGTTACACG |
| | | GCAACCATCTCCTGTGGCGGAAACAACATTGGGACCAAGTCTGTGCACTGG |
| | | TATCAGCAGAAGCCGGGCCAAGCTCCCCTGTTGGTGATCCGCGATGACTCC |
| | | GTGCGGCCTAGCAAAATTCCGGGACGGTTCTCCGGCTCCAACAGCGGCAAT |
| | | ATGGCCACTCTCACCATCTCGGGAGTGCAGGCCGGAGATGAAGCCGACTTC |
| | | TACTGCCAAGTCTGGGACTCAGACTCCGAGCATGTGGTGTTCGGGGGCGGA |
| | | ACCAAGCTGACTGTGCTCACCACTACCCCAGCACCGAGGCCACCCACCCCG |
| | | GCTCCTACCATCGCCTCCCAGCCTCTGTCCCTGCGTCCGGAGGCATGTAGA |
| | | CCCGCAGCTGGTGGGGCCGTGCATACCCGGGGTCTTGACTTCGCCTGCGAT |
| | | ATCTACATTTGGGCCCCTCTGGCTGGTACTTGCGGGGTCCTGCTGCTTTCA |
| | | CTCGTGATCACTCTTTACTGTAAGCGCGGTCGGAAGAAGCTGCTGTACATC |
| | | TTTAAGCAACCCTTCATGAGGCCTGTGCAGACTACTCAAGAGGAGGACGGC |
| | | TGTTCATGCCGGTTCCCAGAGGAGGAGGAAGGCGGCTGCGAACTGCGCGTG |
| | | AAATTCAGCCGCAGCGCAGATGCTCCAGCCTACAAGCAGGGGCAGAACCAG |
| | | CTCTACAACGAACTCAATCTTGGTCGGAGAGAGGAGTACGACGTGCTGGAC |
| | | AAGCGGAGAGGACGGGACCCAGAAATGGGCGGGAAGCCGCGCAGAAAGAAT |
| | | CCCCAAGAGGGCCTGTACAACGAGCTCCAAAAGGATAAGATGGCAGAAGCC |
| | | TATAGCGAGATTGGTATGAAAGGGGAACGCAGAAGAGGCAAAGGCCACGAC |
| | | GGACTGTACCAGGGACTCAGCACCGCCACCAAGGACACCTATGACGCTCTT |
| | | CACATGCAGGCCCTGCCGCCTCGG |

149366

| | | |
|---|---|---|
| 149366-aa | 983 | MALPVTALLLPLALLLHAARPQVQLVQSGAEVKKPGASVKVSCKPSGYTVT |
| Full CAR | | SHYIHWVRRAPGQGLEWMGMINPSGGVTAYSQTLQGRVTMTSDTSSSTVYM |
| | | ELSSLRSEDTAMYYCAREGSGSGWYFDFWGRGTLVTVSSGGGGSGGGGSGG |
| | | GGSSYVLTQPPSVSVSPGQTASITCSGDGLSKKYVSWYQQKAGQSPVVLIS |
| | | RDKERPSGIPDRFSGSNSADTATLTISGTQAMDEADYYCQAWDDTTVVFGG |
| | | GTKLTVLTTTPAPRPPTPAPTIASQPLSLRPEACRPAAGGAVHTRGLDFAC |
| | | DIYIWAPLAGTCGVLLLSLVITLYCKRGRKKLLYIFKQPFMRPVQTTQEED |
| | | GCSCRFPEEEEGGCELRVKFSRSADAPAYKQGQNQLYNELNLGRREEYDVL |
| | | DKRRGRDPEMGGKPRRKNPQEGLYNELQKDKMAEAYSEIGMKGERRRGKGH |
| | | DGLYQGLSTATKDTYDALHMQALPPR |
| 149366-nt | 1005 | ATGGCCCTCCCTGTCACCGCCCTGCTGCTTCCGCTGGCTCTTCTGCTCCAC |
| Full CAR | | GCCGCTCGGCCCCAAGTGCAGCTGGTGCAGAGCGGGGCCGAAGTCAAGAAG |
| | | CCGGGAGCCTCCGTGAAAGTGTCCTGCAAGCCTTCGGGATACACCGTGACC |
| | | TCCCACTACATTCATTGGGTCCGCCGCGCCCCCGGCCAAGGACTCGAGTGG |
| | | ATGGGCATGATCAACCCTAGCGGCGGAGTGACCGCGTACAGCCAGACGCTG |
| | | CAGGGACGCGTGACTATGACCTCGGATACCTCCTCCTCCACCGTCTATATG |
| | | GAACTGTCCAGCCTGCGGTCCGAGGATACCGCCATGTACTACTGCGCCCGG |
| | | GAAGGATCAGGCTCCGGGTGGTATTTCGACTTCTGGGGAAGAGGCACCCTC |
| | | GTGACTGTGTCATCTGGGGGAGGGGGTTCCGGTGGTGGCGGATCGGGAGGA |
| | | GGCGGTTCATCCTACGTGCTGACCCAGCCACCCTCCGTGTCCGTGAGCCCC |
| | | GGCCAGACTGCATCGATTACATGTAGCGGCGACGGCCTCTCCAAGAAATAC |
| | | GTGTCGTGGTACCAGCAGAAGGCCGGACAGAGCCCGGTGGTGCTGATCTCA |
| | | AGAGATAAGGAGCGGCCTAGCGGAATCCCGGACAGGTTCTCGGGTTCCAAC |
| | | TCCGCGGACACTGCTACTCTGACCATCTCGGGGACCCAGGCTATGGACGAA |
| | | GCCGATTACTACTGCCAAGCCTGGGACGACACTACTGTCGTGTTTGGAGGG |
| | | GGCACCAAGTTGACCGTCCTTACCACTACCCCAGCACCGAGGCCACCCACC |
| | | CCGGCTCCTACCATCGCCTCCCAGCCTCTGTCCCTGCGTCCGGAGGCATGT |
| | | AGACCCGCAGCTGGTGGGGCCGTGCATACCCGGGGTCTTGACTTCGCCTGC |
| | | GATATCTACATTTGGGCCCCTCTGGCTGGTACTTGCGGGGTCCTGCTGCTT |
| | | TCACTCGTGATCACTCTTTACTGTAAGCGCGGTCGGAAGAAGCTGCTGTAC |
| | | ATCTTTAAGCAACCCTTCATGAGGCCTGTGCAGACTACTCAAGAGGAGGAC |
| | | GGCTGTTCATGCCGGTTCCCAGAGGAGGAGGAAGGCGGCTGCGAACTGCGC |
| | | GTGAAATTCAGCCGCAGCGCAGATGCTCCAGCCTACAAGCAGGGGCAGAAC |
| | | CAGCTCTACAACGAACTCAATCTTGGTCGGAGAGAGGAGTACGACGTGCTG |
| | | GACAAGCGGAGAGGACGGGACCCAGAAATGGGCGGGAAGCCGCGCAGAAAG |
| | | AATCCCCAAGAGGGCCTGTACAACGAGCTCCAAAAGGATAAGATGGCAGAA |
| | | GCCTATAGCGAGATTGGTATGAAAGGGGAACGCAGAAGAGGCAAAGGCCAC |
| | | GACGGACTGTACCAGGGACTCAGCACCGCCACCAAGGACACCTATGACGCT |
| | | CTTCACATGCAGGCCCTGCCGCCTCGG |

149367

| | | |
|---|---|---|
| 149367-aa | 984 | MALPVTALLLPLALLLHAARPQVQLQESGPGLVKPSQTLSLTCTVSGGSIS |
| Full CAR | | SGGYYWSWIRQHPGKGLEWIGYIYYSGSTYYNPSLKSRVTISVDTSKNQFS |
| | | LKLSSVTAADTAVYYCARAGIAARLRGAFDIWGQGTMVTVSSGGGGSGGGG |
| | | SGGGGSDIVMTQSPSSVSASVGDRVIITCRASQGIRNWLAWYQQKPGKAPN |
| | | LLIYAASNLQSGVPSRFSGSGSGADFTLTISSLQPEDVATYYCQKYNSAPF |
| | | TFGPGTKVDIKTTTPAPRPPTPAPTIASQPLSLRPEACRPAAGGAVHTRGL |
| | | DFACDIYIWAPLAGTCGVLLLSLVITLYCKRGRKKLLYIFKQPFMRPVQTT |
| | | QEEDGCSCRFPEEEEGGCELRVKFSRSADAPAYKQGQNQLYNELNLGRREE |
| | | YDVLDKRRGRDPEMGGKPRRKNPQEGLYNELQKDKMAEAYSEIGMKGERRR |
| | | GKGHDGLYQGLSTATKDTYDALHMQALPPR |
| 149367-nt | 1006 | ATGGCCCTCCCTGTCACCGCCCTGCTGCTTCCGCTGGCTCTTCTGCTCCAC |
| Full CAR | | GCCGCTCGGCCCCAAGTGCAGCTTCAGGAGAGCGGCCCGGGACTCGTGAAG |
| | | CCGTCCCAGACCCTGTCCCTGACTTGCACCGTGTCGGGAGGAAGCATCTCG |
| | | AGCGGAGGCTACTATTGGTCGTGGATTCGGCAGCACCCTGGAAAGGGCCTG |
| | | GAATGGATCGGCTACATCTACTACTCCGGCTCGACCTACTACAACCCATCG |
| | | CTGAAGTCCAGAGTGACAATCTCAGTGGACACGTCCAAGAATCAGTTCAGC |
| | | CTGAAGCTCTCTTCCGTGACTGCGGCCGACACCGCCGTGTACTACTGCGCA |
| | | CGCGCTGGAATTGCCGCCCGGCTGAGGGGTGCCTTCGACATTTGGGGACAG |
| | | GGCACCATGGTCACCGTGTCCTCCGGCGGCGGAGGTTCCGGGGGTGGAGGC |
| | | TCAGGAGGAGGGGGGTCCGACATCGTCATGACTCAGTCGCCCTCAAGCGTC |
| | | AGCGCGTCCGTCGGGGACAGAGTGATCATCACCTGTCGGGCGTCCCAGGGA |
| | | ATTCGCAACTGGCTGGCCTGGTATCAGCAGAAGCCCGGAAAGGCCCCCAAC |
| | | CTGTTGATCTACGCCGCCTCAAACCTCCAATCCGGGGTGCCGAGCCGCTTC |
| | | AGCGGCTCCGGTTCGGGTGCCGATTTCACTCTGACCATCTCCTCCCTGCAA |
| | | CCTGAAGATGTGGCTACCTACTACTGCCAAAAGTACAACTCCGCACCTTTT |
| | | ACTTTCGGACCGGGGACCAAAGTGGACATTAAGACCACTACCCCAGCACCG |
| | | AGGCCACCCACCCCGGCTCCTACCATCGCCTCCCAGCCTCTGTCCCTGCGT |
| | | CCGGAGGCATGTAGACCCGCAGCTGGTGGGGCCGTGCATACCCGGGGTCTT |
| | | GACTTCGCCTGCGATATCTACATTTGGGCCCCTCTGGCTGGTACTTGCGGG |
| | | GTCCTGCTGCTTTCACTCGTGATCACTCTTTACTGTAAGCGCGGTCGGAAG |
| | | AAGCTGCTGTACATCTTTAAGCAACCCTTCATGAGGCCTGTGCAGACTACT |
| | | CAAGAGGAGGACGGCTGTTCATGCCGGTTCCCAGAGGAGGAGGAAGGCGGC |
| | | TGCGAACTGCGCGTGAAATTCAGCCGCAGCGCAGATGCTCCAGCCTACAAG |
| | | CAGGGGCAGAACCAGCTCTACAACGAACTCAATCTTGGTCGGAGAGAGGAG |
| | | TACGACGTGCTGGACAAGCGGAGAGGACGGGACCCAGAAATGGGCGGGAAG |
| | | CCGCGCAGAAAGAATCCCCAAGAGGGCCTGTACAACGAGCTCCAAAAGGAT |
| | | AAGATGGCAGAAGCCTATAGCGAGATTGGTATGAAAGGGGAACGCAGAAGA |
| | | GGCAAAGGCCACGACGGACTGTACCAGGGACTCAGCACCGCCACCAAGGAC |
| | | ACCTATGACGCTCTTCACATGCAGGCCCTGCCGCCTCGG |

149368

| | | |
|---|---|---|
| 149368-aa | 985 | MALPVTALLLPLALLLHAARPQVQLVQSGAEVKKPGSSVKVSCKASGGTFS |
| Full CAR | | SYAISWVRQAPGQGLEWMGGIIPIFGTANYAQKFQGRVTITADESTSTAYM |
| | | ELSSLRSEDTAVYYCARRGGYQLLRWDVGLLRSAFDIWGQGTMVTVSSGGG |
| | | GSGGGGSGGGGSSYVLTQPPSVSVAPGQTARITCGGNNIGSKSVHWYQQKP |
| | | GQAPVLVLYGKNNRPSGVPDRFSGSRSGTTASLTITGAQAEDEADYYCSSR |
| | | DSSGDHLRVFGTGTKVTVLTTTPAPRPPTPAPTIASQPLSLRPEACRPAAG |
| | | GAVHTRGLDFACDIYIWAPLAGTCGVLLLSLVITLYCKRGRKKLLYIFKQP |
| | | FMRPVQTTQEEDGCSCRFPEEEEGGCELRVKFSRSADAPAYKQGQNQLYNE |
| | | LNLGRREEYDVLDKRRGRDPEMGGKPRRKNPQEGLYNELQKDKMAEAYSEI |
| | | GMKGERRRGKGHDGLYQGLSTATKDTYDALHMQALPPR |
| 149368-nt | 1007 | ATGGCCCTCCCTGTCACCGCCCTGCTGCTTCCGCTGGCTCTTCTGCTCCAC |
| Full CAR | | GCCGCTCGGCCCCAAGTGCAGCTGGTCCAGTCGGGCGCCGAGGTCAAGAAG |
| | | CCCGGGAGCTCTGTGAAAGTGTCCTGCAAGGCCTCCGGGGGCACCTTTAGC |
| | | TCCTACGCCATCTCCTGGGTCCGCCAAGCACCGGGTCAAGGCCTGGAGTGG |
| | | ATGGGGGGAATTATCCCTATCTTCGGCACTGCCAACTACGCCCAGAAGTTC |
| | | CAGGGACGCGTGACCATTACCGCGGACGAATCCACCTCCACCGCTTATATG |
| | | GAGCTGTCCAGCTTGCGCTCGGAAGATACCGCCGTGTACTACTGCGCCCGG |
| | | AGGGGTGGATACCAGCTGCTGAGATGGGACGTGGGCCTCCTGCGGTCGGCG |
| | | TTCGACATCTGGGGCCAGGGCACTATGGTCACTGTGTCCAGCGGAGGAGGC |
| | | GGATCGGGAGGCGGCGGATCAGGGGGAGGCGGTTCCAGCTACGTGCTTACT |
| | | CAACCCCCTTCGGTGTCCGTGGCCCCGGGACAGACCGCCAGAATCACTTGC |
| | | GGAGGAAACAACATTGGGTCCAAGAGCGTGCATTGGTACCAGCAGAAGCCA |
| | | GGACAGGCCCCTGTGCTGGTGCTCTACGGGAAGAACAATCGGCCCAGCGGA |
| | | GTGCCGGACAGGTTCTCGGGTTCACGCTCCGGTACAACCGCTTCACTGACT |
| | | ATCACCGGGGCCCAGGCAGAGGATGAAGCGGACTACTACTGTTCCTCCCGG |
| | | GATTCATCCGGCGACCACCTCCGGGTGTTCGGAACCGGAACGAAGGTCACC |
| | | GTGCTGACCACTACCCCAGCACCGAGGCCACCCACCCCGGCTCCTACCATC |
| | | GCCTCCCAGCCTCTGTCCCTGCGTCCGGAGGCATGTAGACCCGCAGCTGGT |
| | | GGGGCCGTGCATACCCGGGGTCTTGACTTCGCCTGCGATATCTACATTTGG |
| | | GCCCCTCTGGCTGGTACTTGCGGGGTCCTGCTGCTTTCACTCGTGATCACT |
| | | CTTTACTGTAAGCGCGGTCGGAAGAAGCTGCTGTACATCTTTAAGCAACCC |
| | | TTCATGAGGCCTGTGCAGACTACTCAAGAGGAGGACGGCTGTTCATGCCGG |
| | | TTCCCAGAGGAGGAGGAAGGCGGCTGCGAACTGCGCGTGAAATTCAGCCGC |
| | | AGCGCAGATGCTCCAGCCTACAAGCAGGGGCAGAACCAGCTCTACAACGAA |
| | | CTCAATCTTGGTCGGAGAGAGGAGTACGACGTGCTGGACAAGCGGAGAGGA |
| | | CGGGACCCAGAAATGGGCGGGAAGCCGCGCAGAAAGAATCCCCAAGAGGGC |
| | | CTGTACAACGAGCTCCAAAAGGATAAGATGGCAGAAGCCTATAGCGAGATT |
| | | GGTATGAAAGGGGAACGCAGAAGAGGCAAAGGCCACGACGGACTGTACCAG |
| | | GGACTCAGCACCGCCACCAAGGACACCTATGACGCTCTTCACATGCAGGCC |
| | | CTGCCGCCTCGG |

149369

| | | |
|---|---|---|
| 149369-aa | 986 | MALPVTALLLPLALLLHAARPEVQLQQSGPGLVKPSQTLSLTCAISGDSVS |
| Full CAR | | SNSAAWNWIRQSPSRGLEWLGRTYYRSKWYSFYAISLKSRIIINPDTSKNQ |
| | | FSLQLKSVTPEDTAVYYCARSSPEGLFLYWFDPWGQGTLVTVSSGGDGSGG |
| | | GGSGGGGSSSELTQDPAVSVALGQTIRITCQGDSLGNYYATWYQQKPGQAP |
| | | VLVIYGTNNRPSGIPDRFSASSSGNTASLTITGAQAEDEADYYCNSRDSSG |
| | | HHLLFGTGTKVTVLTTTPAPRPPTPAPTIASQPLSLRPEACRPAAGGAVHT |
| | | RGLDFACDIYIWAPLAGTCGVLLLSLVITLYCKRGRKKLLYIFKQPFMRPV |
| | | QTTQEEDGCSCRFPEEEEGGCELRVKFSRSADAPAYKQGQNQLYNELNLGR |
| | | REEYDVLDKRRGRDPEMGGKPRRKNPQEGLYNELQKDKMAEAYSEIGMKGE |
| | | RRRGKGHDGLYQGLSTATKDTYDALHMQALPPR |
| 149369-nt | 1008 | ATGGCCCTCCCTGTCACCGCCCTGCTGCTTCCGCTGGCTCTTCTGCTCCAC |
| Full CAR | | GCCGCTCGGCCCGAAGTGCAGCTCCAACAGTCAGGACCGGGGCTCGTGAAG |
| | | CCATCCCAGACCCTGTCCCTGACTTGTGCCATCTCGGGAGATAGCGTGTCA |
| | | TCGAACTCCGCCGCCTGGAACTGGATTCGGCAGAGCCCGTCCCGCGGACTG |
| | | GAGTGGCTTGGAAGGACCTACTACCGGTCCAAGTGGTACTCTTTCTACGCG |
| | | ATCTCGCTGAAGTCCCGCATTATCATTAACCCTGATACCTCCAAGAATCAG |
| | | TTCTCCCTCCAACTGAAATCCGTCACCCCCGAGGACACAGCAGTGTATTAC |
| | | TGCGCACGGAGCAGCCCCGAAGGACTGTTCCTGTATTGGTTTGACCCCTGG |
| | | GGCCAGGGGACTCTTGTGACCGTGTCGAGCGGCGGAGATGGGTCCGGTGGC |
| | | GGTGGTTCGGGGGGCGGCGGATCATCATCCGAACTGACCCAGGACCCGGCT |
| | | GTGTCCGTGGCGCTGGGACAAACCATCCGCATTACGTGCCAGGGAGACTCC |
| | | CTGGGCAACTACTACGCCACTTGGTACCAGCAGAAGCCGGGCCAAGCCCCT |
| | | GTGTTGGTCATCTACGGGACCAACAACAGACCTTCCGGCATCCCCGACCGG |
| | | TTCAGCGCTTCGTCCTCCGGCAACACTGCCAGCCTGACCATCACTGGAGCG |
| | | CAGGCCGAAGATGAGGCCGACTACTACTGCAACAGCAGAGACTCCTCGGGT |
| | | CATCACCTCTTGTTCGGAACTGGAACCAAGGTCACCGTGCTGACCACTACC |
| | | CCAGCACCGAGGCCACCCACCCCGGCTCCTACCATCGCCTCCCAGCCTCTG |
| | | TCCCTGCGTCCGGAGGCATGTAGACCCGCAGCTGGTGGGGCCGTGCATACC |
| | | CGGGGTCTTGACTTCGCCTGCGATATCTACATTTGGGCCCCTCTGGCTGGT |
| | | ACTTGCGGGGTCCTGCTGCTTTCACTCGTGATCACTCTTTACTGTAAGCGC |
| | | GGTCGGAAGAAGCTGCTGTACATCTTTAAGCAACCCTTCATGAGGCCTGTG |
| | | CAGACTACTCAAGAGGAGGACGGCTGTTCATGCCGGTTCCCAGAGGAGGAG |
| | | GAAGGCGGCTGCGAACTGCGCGTGAAATTCAGCCGCAGCGCAGATGCTCCA |
| | | GCCTACAAGCAGGGGCAGAACCAGCTCTACAACGAACTCATTCTTGGTCGG |
| | | AGAGAGGAGTACGACGTGCTGGACAAGCGGAGAGGACGGGACCCAGAAATG |
| | | GGCGGGAAGCCGCGCAGAAAGAATCCCCAAGAGGGCCTGTACAACGAGCTC |
| | | CAAAAGGATAAGATGGCAGAAGCCTATAGCGAGATTGGTATGAAAGGGGAA |
| | | CGCAGAAGAGGCAAAGGCCACGACGGACTGTACCAGGGACTCAGCACCGCC |
| | | ACCAAGGACACCTATGACGCTCTTCACATGCAGGCCCTGCCGCCTCGG |

BCMA_EBB-C1978-A4

| | | |
|---|---|---|
| BCMA_EBB- | 987 | MALPVTALLLPLALLLHAARPEVQLVESGGGLVQPGGSLRLSCAASGFTFS |
| C1978-A4-aa | | SYAMSWVRQAPGKGLEWVSAISGSGGSTYYADSVKGRFTISRDNSKNTLYL |
| Full CART | | QMNSLRAEDTAVYYCAKVEGSGSLDYWGQGTLVTVSSGGGGSGGGGSGGGG |
| | | SEIVMTQSPGTLSLSPGERATLSCRASQSVSSAYLAWYQQKPGQPPRLLIS |
| | | GASTRATGIPDRFGGSGSGTDFTLTISRLEPEDFAVYYCQHYGSSFNGSSL |
| | | FTFGQGTRLEIKTTTPAPRPPTPAPTIASQPLSLRPEACRPAAGGAVHTRG |
| | | LDFACDIYIWAPLAGTCGVLLLSLVITLYCKRGRKKLLYIFKQPFMRPVQT |
| | | TQEEDGCSCRFPEEEEGGCELRVKFSRSADAPAYKQGQNQLYNELNLGRRE |
| | | EYDVLDKRRGRDPEMGGKPRRKNPQEGLYNELQKDKMAEAYSEIGMKGERR |
| | | RGKGHDGLYQGLSTATKDTYDALHMQALPPR |
| BCMA_EBB- | 1009 | ATGGCCCTCCCTGTCACCGCCCTGCTGCTTCCGCTGGCTCTTCTGCTCCAC |
| C1978-A4-nt | | GCCGCTCGGCCCGAAGTGCAGCTCGTGGAGTCAGGAGGCGGCCTGGTCCAG |
| Full CART | | CCGGGAGGGTCCCTTAGACTGTCATGCGCCGCAAGCGGATTCACTTTCTCC |
| | | TCCTATGCCATGAGCTGGGTCCGCCAAGCCCCCGGAAAGGGACTGGAATGG |
| | | GTGTCCGCCATCTCGGGGTCTGGAGGCTCAACTTACTACGCTGACTCCGTG |
| | | AAGGGACGGTTCACCATTAGCCGCGACAACTCCAAGAACACCCTCTACCTC |
| | | CAAATGAACTCCCTGCGGGCCGAGGATACCGCCGTCTACTACTGCGCCAAA |
| | | GTGGAAGGTTCAGGATCGCTGGACTACTGGGGACAGGGTACTCTCGTGACC |
| | | GTGTCATCGGGCGGAGGAGGTTCCGGCGGTGGCGGCTCCGGCGGCGGAGGG |
| | | TCGGAGATCGTGATGACCCAGAGCCCTGGTACTCTGAGCCTTTCGCCGGGA |
| | | GAAAGGGCCACCCTGTCCTGCCGCGCTTCCCAATCCGTGTCCTCCGCGTAC |
| | | TTGGCGTGGTACCAGCAGAAGCCGGGACAGCCCCCTCGGCTGCTGATCAGC |
| | | GGGGCCAGCACCCGGGCAACCGGAATCCCAGACAGATTCGGGGGTTCCGGC |
| | | AGCGGCACAGATTTCACCCTGACTATTTCGAGGTTGGAGCCCGAGGACTTT |
| | | GCGGTGTATTACTGTCAGCACTACGGGTCGTCCTTTAATGGCTCCAGCCTG |
| | | TTCACGTTCGGACAGGGGACCCGCCTGGAAATCAAGACCACTACCCCAGCA |
| | | CCGAGGCCACCCACCCCGGCTCCTACCATCGCCTCCCAGCCTCTGTCCCTG |
| | | CGTCCGGAGGCATGTAGACCCGCAGCTGGTGGGGCCGTGCATACCCGGGGT |
| | | CTTGACTTCGCCTGCGATATCTACATTTGGGCCCCTCTGGCTGGTACTTGC |
| | | GGGGTCCTGCTGCTTTCACTCGTGATCACTCTTTACTGTAAGCGCGGTCGG |
| | | AAGAAGCTGCTGTACATCTTTAAGCAACCCTTCATGAGGCCTGTGCAGACT |
| | | ACTCAAGAGGAGGACGGCTGTTCATGCCGGTTCCCAGAGGAGGAGGAAGGC |
| | | GGCTGCGAACTGCGCGTGAAATTCAGCCGCAGCGCAGATGCTCCAGCCTAC |
| | | AAGCAGGGGCAGAACCAGCTCTACAACGAACTCAATCTTGGTCGGAGAGAG |
| | | GAGTACGACGTGCTGGACAAGCGGAGAGGACGGGACCCAGAAATGGGCGGG |
| | | AAGCCGCGCAGAAAGAATCCCCAAGAGGGCCTGTACAACGAGCTCCAAAAG |
| | | GATAAGATGGCAGAAGCCTATAGCGAGATTGGTATGAAAGGGGAACGCAGA |
| | | AGAGGCAAAGGCCACGACGGACTGTACCAGGGACTCAGCACCGCCACCAAG |
| | | GACACCTATGACGCTCTTCACATGCAGGCCCTGCCGCCTCGG |

BCMA_EBB-C1978-G1

| | | |
|---|---|---|
| BCMA_EBB- | 988 | MALPVTALLLPLALLLHAARPEVQLVETGGGLVQPGGSLRLSCAASGITFS |
| C1978-G1-aa | | RYPMSWVRQAPGKGLEWVSGISDSGVSTYYADSAKGRFTISRDNSKNTLFL |
| Full CART | | QMSSLRDEDTAVYYCVTRAGSEASDIWGQGTMVTVSSGGGGSGGGGSGGGG |
| | | SEIVLTQSPATLSLSPGERATLSCRASQSVSNSLAWYQQKPGQAPRLLIYD |
| | | ASSRATGIPDRFSGSGSGTDFTLTISRLEPEDFAIYYCQQFGTSSGLTFGG |
| | | GTKLEIKTTTPAPRPPTPAPTIASQPLSLRPEACRPAAGGAVHTRGLDFAC |
| | | DIYIWAPLAGTCGVLLLSLVITLYCKRGRKKLLYIFKQPFMRPVQTTQEED |
| | | GCSCRFPEEEEGGCELRVKFSRSADAPAYKQGQNQLYNELNLGRREEYDVL |
| | | DKRRGRDPEMGGKPRRKNPQEGLYNELQKDKMAEAYSEIGMKGERRRGKGH |
| | | DGLYQGLSTATKDTYDALHMQALPPR |
| BCMA_EBB- | 1010 | ATGGCCCTCCCTGTCACCGCCCTGCTGCTTCCGCTGGCTCTTCTGCTCCAC |
| C1978-G1-nt | | GCCGCTCGGCCCGAAGTGCAACTGGTGGAAACCGGTGGCGGCCTGGTGCAG |
| Full CART | | CCTGGAGGATCATTGAGGCTGTCATGCGCGGCCAGCGGTATTACCTTCTCC |
| | | CGGTACCCCATGTCCTGGGTCAGACAGGCCCCGGGGAAAGGGCTTGAATGG |
| | | GTGTCCGGGATCTCGGACTCCGGTGTCAGCACTTACTACGCCGACTCCGCC |
| | | AAGGGACGCTTCACCATTTCCCGGGACAACTCGAAGAACACCCTGTTCCTC |
| | | CAAATGAGCTCCCTCCGGGACGAGGATACTGCAGTGTACTACTGCGTGACC |
| | | CGCGCCGGGTCCGAGGCGTCTGACATTTGGGGACAGGGCACTATGGTCACC |
| | | GTGTCGTCCGGCGGAGGGGGCTCGGGAGGCGGTGGCAGCGGAGGAGGAGGG |
| | | TCCGAGATCGTGCTGACCCAATCCCCGGCCACCCTCTCGCTGAGCCCTGGA |
| | | GAAAGGGCAACCTTGTCCTGTCGCGCGAGCCAGTCCGTGAGCAACTCCCTG |
| | | GCCTGGTACCAGCAGAAGCCCGGACAGGCTCCGAGACTTCTGATCTACGAC |
| | | GCTTCGAGCCGGGCCACTGGAATCCCCGACCGCTTTTCGGGGTCCGGCTCA |
| | | GGAACCGATTTCACCCTGACAATCTCACGGCTGGAGCCAGAGGATTTCGCC |
| | | ATCTATTACTGCCAGCAGTTCGGTACTTCCTCCGGCCTGACTTTCGGAGGC |
| | | GGCACGAAGCTCGAAATCAAGACCACTACCCCAGCACCGAGGCCACCCACC |
| | | CCGGCTCCTACCATCGCCTCCCAGCCTCTGTCCCTGCGTCCGGAGGCATGT |
| | | AGACCCGCAGCTGGTGGGGCCGTGCATACCCGGGGTCTTGACTTCGCCTGC |
| | | GATATCTACATTTGGGCCCCTCTGGCTGGTACTTGCGGGGTCCTGCTGCTT |
| | | TCACTCGTGATCACTCTTTACTGTAAGCGCGGTCGGAAGAAGCTGCTGTAC |
| | | ATCTTTAAGCAACCCTTCATGAGGCCTGTGCAGACTACTCAAGAGGAGGAC |
| | | GGCTGTTCATGCCGGTTCCCAGAGGAGGAGGAAGGCGGCTGCGAACTGCGC |
| | | GTGAAATTCAGCCGCAGCGCAGATGCTCCAGCCTACAAGCAGGGGCAGAAC |
| | | CAGCTCTACAACGAACTCAATCTTGGTCGGAGAGAGGAGTACGACGTGCTG |
| | | GACAAGCGGAGAGGACGGGACCCAGAAATGGGCGGGAAGCCGCGCAGAAAG |
| | | AATCCCCAAGAGGGCCTGTACAACGAGCTCCAAAAGGATAAGATGGCAGAA |
| | | GCCTATAGCGAGATTGGTATGAAAGGGGAACGCAGAAGAGGCAAAGGCCAC |
| | | GACGGACTGTACCAGGGACTCAGCACCGCCACCAAGGACACCTATGACGCT |
| | | CTTCACATGCAGGCCCTGCCGCCTCGG |

BCMA_EBB-1979-C1

| | | |
|---|---|---|
| BCMA_EBB- | 989 | MALPVTALLLPLALLLHAARPQVQLVESGGGLVQPGGSLRLSCAASGFTFS |
| C1979-C1-aa | | SYAMSWVRQAPGKGLEWVSAISGSGGSTYYADSVKGRFTISRDNAKNSLYL |
| Full CART | | QMNSLRAEDTAIYYCARATYKRELRYYYGMDVWGQGTMVTVSSGGGGSGGG |
| | | GSGGGGSEIVMTQSPGTVSLSPGERATLSCRASQSVSSSFLAWYQQKPGQA |
| | | PRLLIYGASSRATGIPDRFSGSGSGTDFTLTISRLEPEDSAVYYCQQYHSS |
| | | PSWTFGQGTRLEIKTTTPAPRPPTPAPTIASQPLSLRPEACRPAAGGAVHT |
| | | RGLDFACDIYIWAPLAGTCGVLLLSLVITLYCKRGRKKLLYIFKQPFMRPV |
| | | QTTQEEDGCSCRFPEEEEGGCELRVKFSRSADAPAYKQGQNQLYNELNLGR |
| | | REEYDVLDKRRGRDPEMGGKPRRKNPQEGLYNELQKDKMAEAYSEIGMKGE |
| | | RRRGKGHDGLYQGLSTATKDTYDALHMQALPPR |
| BCMA_EBB- | 1011 | ATGGCCCTCCCTGTCACCGCCCTGCTGCTTCCGCTGGCTCTTCTGCTCCAC |
| C1979-C1-nt | | GCCGCTCGGCCCCAAGTGCAGCTCGTGGAATCGGGTGGCGGACTGGTGCAG |
| Full CART | | CCGGGGGGCTCACTTAGACTGTCCTGCGCGGCCAGCGGATTCACTTTCTCC |
| | | TCCTACGCCATGTCCTGGGTCAGACAGGCCCCTGGAAAGGGCCTGGAATGG |
| | | GTGTCCGCAATCAGCGGCAGCGGCGGCTCGACCTATTACGCGGATTCAGTG |
| | | AAGGGCAGATTCACCATTTCCCGGGACAACGCCAAGAACTCCTTGTACCTT |
| | | CAAATGAACTCCCTCCGCGCGGAAGATACCGCAATCTACTACTGCGCTCGG |
| | | GCCACTTACAAGAGGGAACTGCGCTACTACTACGGGATGGACGTCTGGGGC |
| | | CAGGGAACCATGGTCACCGTGTCCAGCGGAGGAGGAGGATCGGGAGGAGGC |
| | | GGTAGCGGGGGTGGAGGGTCGGAGATCGTGATGACCCAGTCCCCCGGCACT |
| | | GTGTCGCTGTCCCCCGGCGAACGGGCCACCCTGTCATGTCGGGCCAGCCAG |
| | | TCAGTGTCGTCAAGCTTCCTCGCCTGGTACCAGCAGAAACCGGGACAAGCT |
| | | CCCCGCCTGCTGATCTACGGAGCCAGCAGCCGGGCCACCGGTATTCCTGAC |
| | | CGGTTCTCCGGTTCGGGGTCCGGGACCGACTTTACTCTGACTATCTCTCGC |
| | | CTCGAGCCAGAGGACTCCGCCGTGTATTACTGCCAGCAGTACCACTCCTCC |
| | | CCGTCCTGGACGTTCGGACAGGGCACAAGGCTGGAGATTAAGACCACTACC |
| | | CCAGCACCGAGGCCACCCACCCCGGCTCCTACCATCGCCTCCCAGCCTCTG |
| | | TCCCTGCGTCCGGAGGCATGTAGACCCGCAGCTGGTGGGGCCGTGCATACC |
| | | CGGGGTCTTGACTTCGCCTGCGATATCTACATTTGGGCCCCTCTGGCTGGT |
| | | ACTTGCGGGGTCCTGCTGCTTTCACTCGTGATCACTCTTTACTGTAAGCGC |
| | | GGTCGGAAGAAGCTGCTGTACATCTTTAAGCAACCCTTCATGAGGCCTGTG |
| | | CAGACTACTCAAGAGGAGGACGGCTGTTCATGCCGGTTCCCAGAGGAGGAG |
| | | GAAGGCGGCTGCGAACTGCGCGTGAAATTCAGCCGCAGCGCAGATGCTCCA |
| | | GCCTACAAGCAGGGGCAGAACCAGCTCTACAACGAACTCAATCTTGGTCGG |
| | | AGAGAGGAGTACGACGTGCTGGACAAGCGGAGAGGACGGGACCCAGAAATG |
| | | GGCGGGAAGCCGCGCAGAAAGAATCCCCAAGAGGGCCTGTACAACGAGCTC |
| | | CAAAAGGATAAGATGGCAGAAGCCTATAGCGAGATTGGTATGAAAGGGGAA |
| | | CGCAGAAGAGGCAAAGGCCACGACGGACTGTACCAGGGACTCAGCACCGCC |
| | | ACCAAGGACACCTATGACGCTCTTCACATGCAGGCCCTGCCGCCTCGG |

BCMA_EBB-1978-C7

| | | |
|---|---|---|
| BCMA_EBB- | 990 | MALPVTALLLPLALLLHAARPEVQLVETGGGLVQPGGSLRLSCAASGFTFS |
| C1978-C7-aa | | SYAMSWVRQAPGKGLEWVSAISGSGGSTYYADSVKGRFTISRDNSKNTLYL |
| Full CART | | QMNTLKAEDTAVYYCARATYKRELRYYYGMDVWGQGTTVTVSSGGGGSGGG |
| | | GSGGGGSEIVLTQSPSTLSLSPGESATLSCRASQSVSTTFLAWYQQKPGQA |
| | | PRLLIYGSSNRATGIPDRFSGSGSGTDFTLTIRRLEPEDFAVYYCQQYHSS |
| | | PSWTFGQGTKVEIKTTTPAPRPPTPAPTIASQPLSLRPEACRPAAGGAVHT |
| | | RGLDFACDIYIWAPLAGTCGVLLLSLVITLYCKRGRKKLLYIFKQPFMRPV |
| | | QTTQEEDGCSCRFPEEEEGGCELRVKFSRSADAPAYKQGQNQLYNELNLGR |
| | | REEYDVLDKRRGRDPEMGGKPRRKNPQEGLYNELQKDKMAEAYSEIGMKGE |
| | | RRRGHGHDGLYQGLSTATKDTYDALHMQALPPR |
| BCMA_EBB- | 1012 | ATGGCCCTCCCTGTCACCGCCCTGCTGCTTCCGCTGGCTCTTCTGCTCCAC |
| C1978-C7-nt | | GCCGCTCGGCCCGAGGTGCAGCTTGTGGAAACCGGTGGCGGACTGGTGCAG |
| Full CART | | CCCGGAGGAAGCCTCAGGCTGTCCTGCGCCGCGTCCGGCTTCACCTTCTCC |
| | | TCGTACGCCATGTCCTGGGTCCGCCAGGCCCCCGGAAAGGGCCTGGAATGG |
| | | GTGTCCGCCATCTCTGGAAGCGGAGGTTCCACGTACTACGCGGACAGCGTC |
| | | AAGGGAAGGTTCACAATCTCCCGCGATAATTCGAAGAACACTCTGTACCTT |
| | | CAAATGAACACCCTGAAGGCCGAGGACACTGCTGTGTACTACTGCGCACGG |
| | | GCCACCTACAAGAGAGAGCTCCGGTACTACTACGGAATGGACGTCTGGGGC |
| | | CAGGGAACTACTGTGACCGTGTCCTCGGGAGGGGGTGGCTCCGGGGGGGGC |
| | | GGCTCCGGCGGAGGCGGTTCCGAGATTGTGCTGACCCAGTCACCTTCAACT |
| | | CTGTCGCTGTCCCCGGGAGAGAGCGCTACTCTGAGCTGCCGGGCCAGCCAG |
| | | TCCGTGTCCACCACCTTCCTCGCCTGGTATCAGCAGAAGCCGGGGCAGGCA |
| | | CCACGGCTCTTGATCTACGGGTCAAGCAACAGAGCGACCGGAATTCCTGAC |
| | | CGCTTCTCGGGGAGCGGTTCAGGCACCGACTTCACCCTGACTATCCGGCGC |
| | | CTGGAACCCGAAGATTTCGCCGTGTATTACTGTCAACAGTACCACTCCTCG |
| | | CCGTCCTGGACCTTTGGCCAAGGAACCAAAGTGGAAATCAAGACCACTACC |
| | | CCAGCACCGAGGCCACCCACCCCGGCTCCTACCATCGCCTCCCAGCCTCTG |
| | | TCCCTGCGTCCGGAGGCATGTAGACCCGCAGCTGGTGGGGCCGTGCATACC |
| | | CGGGGTCTTGACTTCGCCTGCGATATCTACATTTGGGCCCCTCTGGCTGGT |
| | | ACTTGCGGGGTCCTGCTGCTTTCACTCGTGATCACTCTTTACTGTAAGCGC |
| | | GGTCGGAAGAAGCTGCTGTACATCTTTAAGCAACCCTTCATGAGGCCTGTG |
| | | CAGACTACTCAAGAGGAGGACGGCTGTTCATGCCGGTTCCCAGAGGAGGAG |
| | | GAAGGCGGCTGCGAACTGCGCGTGAAATTCAGCCGCAGCGCAGATGCTCCA |
| | | GCCTACAAGCAGGGGCAGAACCAGCTCTACAACGAACTCAATCTTGGTCGG |
| | | AGAGAGGAGTACGACGTGCTGGACAAGCGGAGAGGACGGGACCCAGAAATG |
| | | GGCGGGAAGCCGCGCAGAAAGAATCCCCAAGAGGGCCTGTACAACGAGCTC |
| | | CAAAAGGATAAGATGGCAGAAGCCTATAGCGAGATTGGTATGAAAGGGGAA |
| | | CGCAGAAGAGGCAAAGGCCACGACGGACTGTACCAGGGACTCAGCACCGCC |
| | | ACCAAGGACACCTATGACGCTCTTCACATGCAGGCCCTGCCGCCTCGG |

BCMA_EBB-C1978-D10

| | | |
|---|---|---|
| BCMA_EBB- | 991 | MALPVTALLLPLALLLHAARPEVQLVETGGGLVQPGRSLRLSCAASGFTFD |
| C1978-D10-aa | | DYAMHWVRQAPGKGLEWVSGISWNSGSIGYADSVKGRFTISRDNAKNSLYL |
| Full CART | | QMNSLRDEDTAVYYCARVGKAVPDVWGQGTTVTVSSGGGGSGGGGSGGGGS |
| | | DIVMTQTPSSLSASVGDRVTITCRASQSISSYLNWYQQKPGKAPKLLIYAA |
| | | SSLQSGVPSRFSGSGSGTDFTLTISSLQPEDFATYYCQQSYSTPYSFGQGT |
| | | RLEIKTTTPAPRPPTPAPTIASQPLSLRPEACRPAAGGAVHTRGDLFACDI |
| | | YIWAPLAGTCGVLLLSVLITLYCKRGRKKLLYIFKQPFMRPVQTTQEEDGC |
| | | SCRFPEEEEGGCELRVKFSRSADAPAYKQGQNQLYNLELNGRREEYDVLDK |
| | | RRGRDPEMGGKPRRKNPQEGLYNELQKDKMAEAYSEIGMKGERRRGKGHDG |
| | | LYQGLSTATKDTYDALHMQALPPR |
| BCMA_EBB- | 1013 | ATGGCCCTCCCTGTCACCGCCCTGCTGCTTCCGCTGGCTCTTCTGCTCCAC |
| C1978-D10-nt | | GCCGCTCGGCCCGAAGTGCAGCTCGTGGAAACTGGAGGTGGACTCGTGCAG |
| Full CART | | CCTGGACGGTCGCTGCGGCTGAGCTGCGCTGCATCCGGCTTCACCTTCGAC |
| | | GATTATGCCATGCACTGGGTCAGACAGGCGCCAGGGAAGGGACTTGAGTGG |
| | | GTGTCCGGTATCAGCTGGAATAGCGGCTCAATCGGATACGCGGACTCCGTG |
| | | AAGGGAAGGTTCACCATTTCCCGCGACAACGCCAAGAACTCCCTGTACTTG |
| | | CAAATGAACAGCCTCCGGGATGAGGACACTGCCGTGTACTACTGCGCCCGC |
| | | GTCGGAAAAGCTGTGCCCGACGTCTGGGGCCAGGGAACCACTGTGACCGTG |
| | | TCCAGCGGCGGGGGTGGATCGGGCGGTGGAGGGTCCGGTGGAGGGGGCTCA |
| | | GATATTGTGATGACCCAGACCCCCTCGTCCCTGTCCGCCTCGGTCGGCGAC |
| | | CGCGTGACTATCACATGTAGAGCCTCGCAGAGCATCTCCAGCTACCTGAAC |
| | | TGGTATCAGCAGAAGCCGGGGAAGGCCCCGAAGCTCCTGATCTACGCGGCA |
| | | TCATCACTGCAATCGGGAGTGCCGAGCCGGTTTTCCGGGTCCGGCTCCGGC |
| | | ACCGACTTCACGCTGACCATTTCTTCCCTGCAACCCGAGGACTTCGCCACT |
| | | TACTACTGCCAGCAGTCCTACTCCACCCCTTACTCCTTCGGCCAAGGAACC |
| | | AGGCTGGAAATCAAGACCACTACCCCAGCACCGAGGCCACCCACCCCGGCT |
| | | CCTACCATCGCCTCCCAGCCTCTGTCCCTGCGTCCGGAGGCATGTAGACCC |
| | | GCAGCTGGTGGGGCCGTGCATACCCGGGGTCTTGACTTCGCCTGCGATATC |
| | | TACATTTGGGCCCCTCTGGCTGGTACTTGCGGGGTCCTGCTGCTTTCACTC |
| | | GTGATCACTCTTTACTGTAAGCGCGGTCGGAAGAAGCTGCTGTACATCTTT |
| | | AAGCAACCCTTCATGAGGCCTGTGCAGACTACTCAAGAGGAGGACGGCTGT |
| | | TCATGCCGGTTCCCAGAGGAGGAGGAAGGCGGCTGCGAACTGCGCGTGAAA |
| | | TTCAGCCGCAGCGCAGATGCTCCAGCCTACAAGCAGGGGCAGAACCAGCTC |
| | | TACAACGAACTCAATCTTGGTCGGAGAGAGGAGTACGACGTGCTGGACAAG |
| | | CGGAGAGGACGGGACCCAGAAATGGGCGGGAAGCCGCGCAGAAAGAATCCC |
| | | CAAGAGGGCCTGTACAACGAGCTCCAAAAGGATAAGATGGCAGAAGCCTAT |
| | | AGCGAGATTGGTATGAAAGGGGAACGCAGAAGAGGCAAAGGCCACGACGGA |
| | | CTGTACCAGGGACTCAGCACCGCCACCAAGGACACCTATGACGCTCTTCAC |
| | | ATGCAGGCCCTGCCGCCTCGG |

BCMA_EBB-C1979-C12

| | | |
|---|---|---|
| BCMA_EBB- | 992 | MALPVTALLLPLALLLHAARPEVQLVESGGGLVQPGRSLRLSCTASGFTFD |
| C1979-C12- | | DYAMHWVRQRPGKGLEWVASINWKGNSLAYGDSVKGRFAISRDNAKNTVFL |
| aa | | QMNSLRTEDTAVYYCASHQGVAYYNYAMDVWGRGTLVTVSSGGGGSGGGGS |
| Full CART | | GGGGSEIVLTQSPGTLSLSPGERATLSCRATQSIGSSFLAWYQQRPGQAPR |
| | | LLIYGASQRATFIPDRFSGRGSGTDFTLTISRVEPEDSAVYYCQHYESSPS |
| | | WTFGQGTKVEIKTTTPAPRPPTPAPTIASQPLSLRPEACRPAAGGAVHTRG |
| | | LDFACDIYIWAPLAGTCGVLLLSLVITLYCKRGRKKLLYIFKQPFMRPVQT |
| | | TQEEDGCSCRFPEEEEGGCELRVKFSRSADAPAYKQGQNQLYNELNLGRRE |
| | | EYDVLDKRRGRDPEMGGKPRRKNPQEGLYNELQKDKMAEAYSEIGMKGERR |
| | | RGHGHDGLYQGLSTATKDTYDALHMQALPPR |
| BCMA_EBB- | 1014 | ATGGCCCTCCCTGTCACCGCCCTGCTGCTTCCGCTGGCTCTTCTGCTCCAC |
| C1979-C12- | | GCCGCTCGGCCCGAAGTGCAGCTCGTGGAGAGCGGGGGAGGATTGGTGCAG |
| nt | | CCCGGAAGGTCCCTGCGGCTCTCCTGCACTGCGTCTGGCTTCACCTTCGAC |
| Full CART | | GACTACGCGATGCACTGGGTCAGACAGCGCCCGGGAAAGGGCCTGGAATGG |
| | | GTCGCCTCAATCAACTGGAAGGGAAACTCCCTGGCCTATGGCGACAGCGTG |
| | | AAGGGCCGCTTCGCCATTTCGCGCGACAACGCCAAGAACACCGTGTTTCTG |
| | | CAAATGAATTCCCTGCGGACCGAGGATACCGCTGTGTACTACTGCGCCAGC |
| | | CACCAGGGCGTGGCATACTATAACTACGCCATGGACGTGTGGGGAAGAGGG |
| | | ACGCTCGTCACCGTGTCCTCCGGGGGCGGTGGATCGGGTGGAGGAGGAAGC |
| | | GGTGGCGGGGGCAGCGAAATCGTGCTGACTCAGAGCCCGGGAACTCTTTCA |
| | | CTGTCCCCGGGAGAACGGGCCACTCTCTCGTGCCGGGCCACCCAGTCCATC |
| | | GGCTCCTCCTTCCTTGCCTGGTACCAGCAGAGGCCAGGACAGGCGCCCCGC |
| | | CTGCTGATCTACGGTGCTTCCCAACGCGCCACTGGCATTCCTGACCGGTTC |
| | | AGCGGCAGAGGGTCGGGAACCGATTTCACACTGACCATTTCCCGGGTGGAG |
| | | CCCGAAGATTCGGCAGTCTACTACTGTCAGCATTACGAGTCCTCCCCTTCA |
| | | TGGACCTTCGGTCAAGGGACCAAAGTGGAGATCAAGACCACTACCCCAGCA |
| | | CCGAGGCCACCCACCCCGGCTCCTACCATCGCCTCCCAGCCTCTGTCCCTG |
| | | CGTCCGGAGGCATGTAGACCCGCAGCTGGTGGGGCCGTGCATACCCGGGGT |
| | | CTTGACTTCGCCTGCGATATCTACATTTGGGCCCCTCTGGCTGGTACTTGC |
| | | GGGGTCCTGCTGCTTTCACTCGTGATCACTCTTTACTGTAAGCGCGGTCGG |
| | | AAGAAGCTGCTGTACATCTTTAAGCAACCCTTCATGAGGCCTGTGCAGACT |
| | | ACTCAAGAGGAGGACGGCTGTTCATGCCGGTTCCCAGAGGAGGAGGAAGGC |
| | | GGCTGCGAACTGCGCGTGAAATTCAGCCGCAGCGCAGATGCTCCAGCCTAC |
| | | AAGCAGGGGCAGAACCAGCTCTACAACGAACTCAATCTTGGTCGGAGAGAG |
| | | GAGTACGACGTGCTGGACAAGCGGAGAGGACGGGACCCAGAAATGGGCGGG |
| | | AAGCCGCGCAGAAAGAATCCCCAAGAGGGCCTGTACAACGAGCTCCAAAAG |
| | | GATAAGATGGCAGAAGCCTATAGCGAGATTGGTATGAAAGGGGAACGCAGA |
| | | AGAGGCAAAGGCCACGACGGACTGTACCAGGGACTCAGCACCGCCACCAAG |
| | | GACACCTATGACGCTCTTCACATGCAGGCCCTGCCGCCTCGG |

BCMA_EBB-C1980-G4

| | | |
|---|---|---|
| BCMA_EBB- | 993 | MALPVTALLLPLALLLHAARPEVQLVESGGGLVQPGGSLRLSCAASGFTFS |
| C1980-G4-aa | | SYAMSWVRQAPGKGLEWVSAISGSGGSTYYADSVKGRFTISRDNSKNTLYL |
| Full CART | | QMNSLRAEDTAVYYCAKVVRDGMDVWGQGTTVTVSSGGGGSGGGGSGGGGS |
| | | EIVLTQSPATLSLSPGERATLSCRASQSVSSSYLAWYQQKPGQAPRLLIYG |
| | | ASSRATGIPDRFSGNGSGTDFTLTISRLEPEDFAVYYCQQYGSPPRFTFGP |
| | | GTKVDIKTTTPAPRPPTPAPTIASQPLSLRPEACRPAAGGAVHTRGLDFAC |
| | | DIYIWAPLAGTCGVLLLSLVITLYCKRGRKKLLYIFKQPFMRPVQTTQEED |
| | | GCSCRFPEEEEGGCELRVKFSRSADAPAYKQGQNQLYNELNLGRREEYDVL |
| | | DKRRGRDPEMGGKPRRKNPQEGLYNELQKDKMAEAYSEIGMKGERRRGKGH |
| | | DGLYQGLSTATKDTYDALHMQALPPR |
| BCMA_EBB- | 1015 | ATGGCCCTCCCTGTCACCGCCCTGCTGCTTCCGCTGGCTCTTCTGCTCCAC |
| C1980-G4-nt | | GCCGCTCGGCCCGAGGTGCAGTTGGTCGAAAGCGGGGGCGGGCTTGTGCAG |
| Full CART | | CCTGGCGGATCACTGCGGCTGTCCTGCGCGGCATCAGGCTTCACGTTTTCT |
| | | TCCTACGCCATGTCCTGGGTGCGCCAGGCCCCTGGAAAGGGACTGGAATGG |
| | | GTGTCCGCGATTTCGGGGTCCGGCGGGAGCACCTACTACGCCGATTCCGTG |
| | | AAGGGCCGCTTCACTATCTCGCGGGACAACTCCAAGAACACCCTCTACCTC |
| | | CAAATGAATAGCCTGCGGGCCGAGGATACCGCCGTCTACTATTGCGCTAAG |
| | | GTCGTGCGCGACGGAATGGACGTGTGGGGACAGGGTACCACCGTGACAGTG |
| | | TCCTCGGGGGGAGGCGGTAGCGGCGGAGGAGGAAGCGGTGGTGGAGGTTCC |
| | | GAGATTGTGCTGACTCAATCACCCGCGACCCTGAGCCTGTCCCCCGGCGAA |
| | | AGGGCCACTCTGTCCTGTCGGGCCAGCCAATCAGTCTCCTCCTCGTACCTG |
| | | GCCTGGTACCAGCAGAAGCCAGGACAGGCTCCGAGACTCCTTATCTATGGC |
| | | GCATCCTCCCGCGCCACCGGAATCCCGGATAGGTTCTCGGGAAACGGATCG |
| | | GGGACCGACTTCACTCTCACCATCTCCCGGCTGGAACCGGAGGACTTCGCC |
| | | GTGTACTACTGCCAGCAGTACGGCAGCCCGCCTAGATTCACTTTCGGCCCC |
| | | GGCACCAAAGTGGACATCAAGACCACTACCCCAGCACCGAGGCCACCCACC |
| | | CCGGCTCCTACCATCGCCTCCCAGCCTCTGTCCCTGCGTCCGGAGGCATGT |
| | | AGACCCGCAGCTGGTGGGGCCGTGCATACCCGGGGTCTTGACTTCGCCTGC |
| | | GATATCTACATTTGGGCCCCTCTGGCTGGTACTTGCGGGGTCCTGCTGCTT |
| | | TCACTCGTGATCACTCTTTACTGTAAGCGCGGTCGGAAGAAGCTGCTGTAC |
| | | ATCTTTAAGCAACCCTTCATGAGGCCTGTGCAGACTACTCAAGAGGAGGAC |
| | | GGCTGTTCATGCCGGTTCCCAGAGGAGGAGGAAGGCGGCTGCGAACTGCGC |
| | | GTGAAATTCAGCCGCAGCGCAGATGCTCCAGCCTACAAGCAGGGGCAGAAC |
| | | CAGCTCTACAACGAACTCAATCTTGGTCGGAGAGAGGAGTACGACGTGCTG |
| | | GACAAGCGGAGAGGACGGGACCCAGAAATGGGCGGGAAGCCGCGCAGAAAG |
| | | AATCCCCAAGAGGGCCTGTACAACGAGCTCCAAAAGGATAAGATGGCAGAA |
| | | GCCTATAGCGAGATTGGTATGAAAGGGGAACGCAGAAGAGGCAAAGGCCAC |
| | | GACGGACTGTACCAGGGACTCAGCACCGCCACCAAGGACACCTATGACGCT |
| | | CTTCACATGCAGGCCCTGCCGCCTCGG |

BCMA_EBB-C1980-D2

| | | |
|---|---|---|
| BCMA_EBB- | 994 | MALPVTALLLPLALLLHAARPEVQLLESGGGLVQPGGSLRLSCAASGFTFS |
| C1980-D2-aa | | SYAMSWVRQAPGKGLEWVSAISGSGGSTYYADSVKGRFTISRDNSKNTLYL |
| Full CART | | QMNSLRAEDTAVYYCAKIPQTGTFDYWGQGTLVTVSSGGGGSGGGGSGGGG |
| | | SEIVLTQSPGTLSLSPGERATLSCRASQSVSSSYLAWYQQRPGQAPRLLIY |
| | | GASSRATGIPDRFSGSGSGTDFTLTISRLEPEDFACYYCQHYGSSPSWTFG |
| | | QGTRLEIKTTTPAPRPPTPAPTIASQPLSLRPEACRPAAGGAVHTRGLDFA |
| | | CDIYIWAPLAGTCGVLLLSLVITLYCKRGRKKLLYIFKQPFMRPVQTTQEE |
| | | DGCSCRFPEEEEGGCELRVKFSRSADAPAYKQGQNQLYNELNLGRREEYDV |
| | | LDKRRGRDPEMGGKPRRKNPQEGLYNELQKDKMAEAYSEIGMKGERRRGKG |
| | | HDGLYQGLSTATKDTYDALHMQALPPR |
| BCMA_EBB- | 1016 | ATGGCCCTCCCTGTCACCGCCCTGCTGCTTCCGCTGGCTCTTCTGCTCCAC |
| C1980-D2-nt | | GCCGCTCGGCCCGAAGTGCAGCTGCTGGAGTCCGGCGGTGGATTGGTGCAA |
| Full CART | | CCGGGGGGATCGCTCAGACTGTCCTGTGCGGCGTCAGGCTTCACCTTCTCG |
| | | AGCTACGCCATGTCATGGGTCAGACAGGCCCCTGGAAAGGGTCTGGAATGG |
| | | GTGTCCGCCATTTCCGGGAGCGGGGGATCTACATACTACGCCGATAGCGTG |
| | | AAGGGCCGCTTCACCATTTCCCGGGACAACTCCAAGAACACTCTCTATCTG |
| | | CAAATGAACTCCCTCCGCGCTGAGGACACTGCCGTGTACTACTGCGCCAAA |
| | | ATCCCTCAGACCGGCACCTTCGACTACTGGGGACAGGGGACTCTGGTCACC |
| | | GTCAGCAGCGGTGGCGGAGGTTCGGGGGGAGGAGGAAGCGGCGGCGGAGGG |
| | | TCCGAGATTGTGCTGACCCAGTCACCCGGCACTTTGTCCCTGTCGCCTGGA |
| | | GAAAGGGCCACCCTTTCCTGCCGGGCATCCCAATCCGTGTCCTCCTCGTAC |
| | | CTGGCCTGGTACCAGCAGAGGCCCGGACAGGCCCCACGGCTTCTGATCTAC |
| | | GGAGCAAGCAGCCGCGCGACCGGTATCCCGGACCGGTTTTCGGGCTCGGGC |
| | | TCAGGAACTGACTTCACCCTCACCATCTCCCGCCTGGAACCCGAAGATTTC |
| | | GCTGTGTATTACTGCCAGCACTACGGCAGCTCCCCGTCCTGGACGTTCGGC |
| | | CAGGGAACTCGGCTGGAGATCAAGACCACTACCCCAGCACCGAGGCCACCC |
| | | ACCCCGGCTCCTACCATCGCCTCCCAGCCTCTGTCCCTGCGTCCGGAGGCA |
| | | TGTAGACCCGCAGCTGGTGGGGCCGTGCATACCCGGGGTCTTGACTTCGCC |
| | | TGCGATATCTACATTTGGGCCCCTCTGGCTGGTACTTGCGGGGTCCTGCTG |
| | | CTTTCACTCGTGATCACTCTTTACTGTAAGCGCGGTCGGAAGAAGCTGCTG |
| | | TACATCTTTAAGCAACCCTTCATGAGGCCTGTGCAGACTACTCAAGAGGAG |
| | | GACGGCTGTTCATGCCGGTTCCCAGAGGAGGAGGAAGGCGGCTGCGAACTG |
| | | CGCGTGAAATTCAGCCGCAGCGCAGATGCTCCAGCCTACAAGCAGGGGCAG |
| | | AACCAGCTCTACAACGAACTCAATCTTGGTCGGAGAGAGGAGTACGACGTG |
| | | CTGGACAAGCGGAGAGGACGGGACCCAGAAATGGGCGGGAAGCCGCGCAGA |
| | | AAGAATCCCCAAGAGGGCCTGTACAACGAGCTCCAAAAGGATAAGATGGCA |
| | | GAAGCCTATAGCGAGATTGGTATGAAAGGGGAACGCAGAAGAGGCAAAGGC |
| | | CACGACGGACTGTACCAGGGACTCAGCGACCGCCACCAAGGACACCTATGA |
| | | GCTCTTCACATGCAGGCCCTGCCGCCTCGG |

BCMA_EBB-C1978-A10

| | | |
|---|---|---|
| BCMA_EBB- | 995 | MALPVTALLLPLALLLHAARPEVQLVETGGGLVQPGGSLRLSCAASGFTFS |
| C1978-A10- | | SYAMSWVRQAPGKGLEWVSAISGSGGSTYYADSVKGRFTMSRENDKNSVFL |
| aa | | QMNSLRVEDTGVYYCARANYKRELRYYYGMDVWGQGTMVTVSSGGGGSGGG |
| Full CART | | GSGGGGSEIVMTQSPGTLSLSPGESATLSCRASQEVASNYLAWYQHKPGQA |
| | | PSLLISGASSRATPVDPRFSGSGSGTDFTLAISRLEPEDSAVYYCQHYDSS |
| | | PSWTFGQGTKVEIKTTTPAPRPPTPAPTIASQPLSLRPEACRPAAGGAVHT |
| | | RGLDFACDIYIWAPLAGTCGVLLLSLVITLYCKRGRKKLLYIFKQPFMRPV |
| | | QTTQEEDGCSCRFPEEEEGGCELRVKFSRSADAPAYKQGQNQLYNELNLGR |
| | | REEYDVLDKRRGRDPEMGGKPRRKNPQEGLYNELQKDKMAEAYSEIGMKGE |
| | | RRRGKGHDGLYQGLSTATKDTYDALHMQALPPR |
| BCMA_EBB- | 1017 | ATGGCCCTCCCTGTCACCGCCCTGCTGCTTCCGCTGGCTCTTCTGCTCCAC |
| C1978-A10- | | GCCGCTCGGCCCGAAGTGCAACTGGTGGAAACCGGTGGAGGACTCGTGCAG |
| nt | | CCTGGCGGCAGCCTCCGGCTGAGCTGCGCCGCTTCGGGATTCACCTTTTCC |
| Full CART | | TCCTACGCGATGTCTTGGGTCAGACAGGCCCCCGGAAAGGGGCTGGAATGG |
| | | GTGTCAGCCATCTCCGGCTCCGGCGGATCAACGTACTACGCCGACTCCGTG |
| | | AAAGGCCGGTTCACCATGTCGCGCGAGAATGACAAGAACTCCGTGTTCCTG |
| | | CAAATGAACTCCCTGAGGGTGGAGGACACCGGAGTGTACTATTGTGCGCGC |
| | | GCCAACTACAAGAGAGAGCTGCGGTACTACTACGGAATGGACGTCTGGGGA |
| | | CAGGGAACTATGGTGACCGTGTCATCCGGTGGAGGGGGAAGCGGCGGTGGA |
| | | GGCAGCGGGGGCGGGGGTTCAGAAATTGTCATGACCCAGTCCCCGGGAACT |
| | | CTTTCCCTCTCCCCCGGGGAATCCGCGACTTTGTCCTGCCGGGCCAGCCAG |
| | | CGCGTGGCCTCGAACTACCTCGCATGGTACCAGCATAAGCCAGGCCAAGCC |
| | | CCTTCCCTGCTGATTTCCGGGGCTAGCAGCCGCGCCACTGGCGTGCCGGAT |
| | | AGGTTCTCGGGAAGCGGCTCGGGTACCGATTTCACCCTGGCAATCTCGCGG |
| | | CTGGAACCGGAGGATTCGGCCGTGTACTACTGCCAGCACTATGACTCATCC |
| | | CCCTCCTGGACATTCGGACAGGGCACCAAGGTCGAGATCAAGACCACTACC |
| | | CCAGCACCGAGGCCACCCACCCCGGCTCCTACCATCGCCTCCCAGCCTCTG |
| | | TCCCTGCGTCCGGAGGCATGTAGACCCGCAGCTGGTGGGGCCGTGCATACC |
| | | CGGGGTCTTGACTTCGCCTGCGATATCTACATTTGGGCCCCTCTGGCTGGT |
| | | ACTTGCGGGGTCCTGCTGCTTTCACTCGTGATCACTCTTTACTGTAAGCGC |
| | | GGTCGGAAGAAGCTGCTGTACATCTTTAAGCAACCCTTCATGAGGCCTGTG |
| | | CAGACTACTCAAGAGGAGGACGGCTGTTCATGCCGGTTCCCAGAGGAGGAG |
| | | GAAGGCGGCTGCGAACTGCGCGTGAAATTCAGCCGCAGCGCAGATGCTCCA |
| | | GCCTACAAGCAGGGGCAGAACCAGCTCTACAACGAACTCAATCTTGGTCGG |
| | | AGAGAGGAGTACGACGTGCTGGACAAGCGGAGAGGACGGGACCCAGAAATG |
| | | GGCGGGAAGCCGCGCAGAAAGAATCCCCAAGAGGGCCTGTACAACGAGCTC |
| | | CAAAAGGATAAGATGGCAGAAGCCTATAGCGAGATTGGTATGAAAGGGGAA |
| | | CGCAGAAGAGGCAAAGGCCACGACGGACTGTACCAGGGACTCAGCACCGCC |
| | | ACCAAGGACACCTATGACGCTCTTCACATGCAGGCCCTGCCGCCTCGG |

BCMA_EBB-C1978-D4

| | | |
|---|---|---|
| BCMA_EBB- | 996 | MALPVTALLLPLALLLHAARPEVQLLETGGGLVQPGGSLRLSCAASGFSFS |
| C1978-D4-aa | | SYAMSWVRQAPGKGLEWVSAISGSGGSTYYADSVKGRFTISRDNSKNTLYL |
| Full CART | | QMNSLRAEDTAVYYCAKALVGATGAFDIWGQGTLVTVSSGGGGSGGGGSGG |
| | | GGSEIVLTQSPGTLSLSPGERATLSCRASQSLSSNFLAWYQQKPGQAPGLL |
| | | IYGASNWATGTPDRFSGSGSGTDFTLTITRLEPEDFAVYYCQYYGTSPMYT |
| | | FGQGTKVEIKTTTPAPRPPTPAPTIASQPLSLRPEACRPAAGGAVHTRGLD |
| | | FACDIYIWAPLAGTCGVLLLSLVITLYCKRGRKKLLYIFKQPFMRPVQTTQ |
| | | EEDGCSCRFPEEEEGGCELRVKFSRSADAPAYKQGQNQLYNELNLGRREEY |
| | | DVLDKRRGRDPEMGGKPRRKNPQEGLYNELQKDKMAEAYSEIGMKGERRRG |
| | | KGHDGLYQGLSTATKDTYDALHMQALPPR |
| BCMA_EBB- | 1018 | ATGGCCCTCCCTGTCACCGCCCTGCTGCTTCCGCTGGCTCTTCTGCTCCAC |
| C1978-D4-nt | | GCCGCTCGGCCCGAAGTGCAGCTGCTCGAAACCGGTGGAGGGCTGGTGCAG |
| Full CART | | CCAGGGGGCTCCCTGAGGCTTTCATGCGCCGCTAGCGGATTCTCCTTCTCC |
| | | TCTTACGCCATGTCGTGGGTCCGCCAAGCCCCTGGAAAAGGCCTGGAATGG |
| | | GTGTCCGCGATTTCCGGGAGCGGAGGTTCGACCTATTACGCCGACTCCGTG |
| | | AAGGGCCGCTTTACCATCTCCCGGGATAACTCCAAGAACACTCTGTACCTC |
| | | CAAATGAACTCGCTGAGAGCCGAGGACACCGCCGTGTATTACTGCGCGAAG |
| | | GCGCTGGTCGGCGCGACTGGGGCATTCGACATCTGGGGACAGGGAACTCTT |
| | | GTGACCGTGTCGAGCGGAGGCGGCGGCTCCGGCGGAGGAGGGAGCGGGGGC |
| | | GGTGGTTCCGAAATCGTGTTGACTCAGTCCCCGGGAACCCTGAGCTTGTCA |
| | | CCCGGGGAGCGGGCCACTCTCTCCTGTCGCGCCTCCCAATCGCTCTCATCC |
| | | AATTTCCTGGCCTGGTACCAGCAGAAGCCCGGACAGGCCCCGGGCCTGCTC |
| | | ATCTACGGCGCTTCAAACTGGGCAACGGGAACCCCTGATCGGTTCAGCGGA |
| | | AGCGGATCGGGTACTGACTTTACCCTGACCATCACCAGACTGGAACCGGAG |
| | | GACTTCGCCGTGTACTACTGCCAGTACTACGGCACCTCCCCCATGTACACA |
| | | TTCGGACAGGGTACCAAGGTCGAGATTAAGACCACTACCCCAGCACCGAGG |
| | | CCACCCACCCCGGCTCCTACCATCGCCTCCCAGCCTCTGTCCCTGCGTCCG |
| | | GAGGCATGTAGACCCGCAGCTGGTGGGGCCGTGCATACCCGGGGTCTTGAC |
| | | TTCGCCTGCGATATCTACATTTGGGCCCCTCTGGCTGGTACTTGCGGGGTC |
| | | CTGCTGCTTTCACTCGTGATCACTCTTTACTGTAAGCGCGGTCGGAAGAAG |
| | | CTGCTGTACATCTTTAAGCAACCCTTCATGAGGCCTGTGCAGACTACTCAA |
| | | GAGGAGGACGGCTGTTCATGCCGGTTCCCAGAGGAGGAGGAAGGCGGCTGC |
| | | GAACTGCGCGTGAAATTCAGCCGCAGCGCAGATGCTCCAGCCTACAAGCAG |
| | | GGGCAGAACCAGCTCTACAACGAACTCAATCTTGGTCGGAGAGAGGAGTAC |
| | | GACGTGCTGGACAAGCGGAGAGGACGGGACCCAGAAATGGGCGGGAAGCCG |
| | | CGCAGAAAGAATCCCCAAGAGGGCCTGTACAACGAGCTCCAAAAGGATAAG |
| | | ATGGCAGAAGCCTATAGCGAGATTGGTATGAAAGGGGAACGCAGAAGAGGC |
| | | AAAGGCCACGACGGACTGTACCAGGGACTCAGCACCGCCACCAAGGACACC |
| | | TATGACGCTCTTCACATGCAGGCCCTGCCGCCTCGG |

BCMA_EBB-C1980-A2

| | | |
|---|---|---|
| BCMA_EBB- | 997 | MALPVTALLLPLALLLHAARPEVQLLESGGGLVQPGGSLRLSCAASGFTFS |
| C1980-A2-aa | | SYAMSWVRQAPGKGLEWVSAISGSGGSTYYADSVKGRFTIARDNSKNTLYL |
| Full CART | | QMNSLRAEDTAVYYCVLWFGEGFDPWGQGTLVTVSSGGGGSGGGGSGGGGS |
| | | DIVLTQSPLSLPVTPGEPASISVRSSQSLLHSNGYNYLDWYLQKPGQSPQL |
| | | LIYLGSNRASGPVDRFSGSGSGTDFTLKISRVEAEDVGVYYCMQALQTPLT |
| | | FGGGTKVDIKTTTPAPRPPTPAPTIASQPLSLREPACRPAAGGAVHTRGLD |
| | | FACDIYIWAPLAGTCGVLLLSLVITLYCKRGRKKLLYIFKQPFMRPVQTTQ |
| | | EEDGCSCRFPEEEEGGCELRVKFSRSADAPAYKQGQGQLYNELNLGRREEY |
| | | DVLDKRRGRDPEMGGKPRRKNPQEGLYNELQKDKMAEAYSEIGMKGERRRG |
| | | KGHDGLYQGLSTATKDTYDALHMQALPPR |
| BCMA_EBB- | 1019 | ATGGCCCTCCCTGTCACCGCCCTGCTGCTTCCGCTGGCTCTTCTGCTCCAC |
| C1980-A2-nt | | GCCGCTCGGCCCGAAGTGCAGCTGCTTGAGAGCGGTGGAGGTCTGGTGCAG |
| Full CART | | CCCGGGGGATCACTGCGCCTGTCCTGTGCCGCGTCCGGTTTCACTTTCTCC |
| | | TCGTACGCCATGTCGTGGGTCAGACAGGCACCGGGAAAGGGACTGGAATGG |
| | | GTGTCAGCCATTTCGGGTTCGGGGGGCAGCACCTACTACGCTGACTCCGTG |
| | | AAGGGCCGGTTCACCATTTCCCGCGACAACTCCAAGAACACCTTGTACCTC |
| | | CAAATGAACTCCCTGCGGGCCGAAGATACCGCCGTGTATTACTGCGTGCTG |
| | | TGGTTCGGAGAGGGATTCGACCCGTGGGGACAAGGAACACTCGTGACTGTG |
| | | TCATCCGGCGGAGGCGGCAGCGGTGGCGGCGGTTCCGGCGGCGGCGGATCT |
| | | GACATCGTGTTGACCCAGTCCCCTCTGAGCCTGCCGGTCACTCCTGGCGAA |
| | | CCAGCCAGCATCTCCTGCCGGTCGAGCCAGTCCCTCCTGCACTCCAATGGG |
| | | TACAACTACCTCGATTGGTATCTGCAAAAGCCGGGCCAGAGCCCCCAGCTG |
| | | CTGATCTACCTTGGGTCAAACCGCGCTTCCGGGGTGCCTGATAGATTCTCC |
| | | GGGTCCGGGAGCGGAACCGACTTTACCCTGAAAATCTCGAGGGTGGAGGCC |
| | | GAGGACGTCGGAGTGTACTACTGCATGCAGGCGCTCCAGACTCCCCTGACC |
| | | TTCGGAGGAGGAACGAAGGTCGACATCAAGACCACTACCCCAGCACCGAGG |
| | | CCACCCACCCCGGCTCCTACCATCGCCTCCCAGCCTCTGTCCCTGCGTCCG |
| | | GAGGCATGTAGACCCGCAGCTGGTGGGGCCGTGCATACCCGGGGTCTTGAC |
| | | TTCGCCTGCGATATCTACATTTGGGCCCCTCTGGCTGGTACTTGCGGGGTC |
| | | CTGCTGCTTTCACTCGTGATCACTCTTTACTGTAAGCGCGGTCGGAAGAAG |
| | | CTGCTGTACATCTTTAAGCAACCCTTCATGAGGCCTGTGCAGACTACTCAA |
| | | GAGGAGGACGGCTGTTCATGCCGGTTCCCAGAGGAGGAGGAAGGCGGCTGC |
| | | GAACTGCGCGTGAAATTCAGCCGCAGCGCAGATGCTCCAGCCTACAAGCAG |
| | | GGGCAGAACCAGCTCTACAACGAACTCAATCTTGGTCGGAGAGAGGAGTAC |
| | | GACGTGCTGGACAAGCGGAGAGGACGGGACCCAGAAATGGGCGGGAAGCCG |
| | | CGCAGAAAGAATCCCCAAGAGGGCCTGTACAACGAGCTCCAAAAGGATAAG |
| | | ATGGCAGAAGCCTATAGCGAGATTGGTATGAAAGGGGAACGCAGAAGAGGC |
| | | AAAGGCCACGACGGACTGTACCAGGGACTCAGCACCGCCACCAAGGACACC |
| | | TATGACGCTCTTCACATGCAGGCCCTGCCGCCTCGG |

BCMA_EBB-C1981-C3

| | | |
|---|---|---|
| BCMA_EBB- | 998 | MALPVTALLLPLALLLHAARPQVQLVESGGGLVQPGGSLRLSCAASGFTFS |
| C1981-C3-aa | | SYAMSWVRQAPGKGLEWVSAISGSGGSTYYADSVKGRFTISRDNSKNTLYL |
| Full CART | | QMNSLRAEDTAVYYCAKVGYDSSGYYRDYYGMDVWGQGTTVTVSSGGGGSG |
| | | GGGSGGGGSEIVLTQSPGTLSLSPGERATLSCRASQSVSSSYLAWYQQKPG |
| | | QAPRLLIYGTSSRATGISDRFSGSGSGTDFTLTISRLEPEDFAVYYCQHYG |
| | | NSPPKFTFGPGTKLEIKTTTPAPRPPTPAPTIASQPLSLRPEACRPAAGGA |
| | | VHTRGLDFACDIYIWAPLAGTCGVLLLSLVITLYCKRGRKKLLYIFKQPFM |
| | | RPVQTTQEEDGCSCRFPEEEEGGCELRVKFSRSADAPAYKQGQNQLYNELN |
| | | LGRREEYDVLDKRRGRDPEMGGKPRRKNPQELGYNELQKDKMAEAYSEIGM |
| | | KGERRRGKGHDGLYQGLSTATDKTYDALHMQALPPR |
| BCMA_EBB- | 1020 | ATGGCCCTCCCTGTCACCGCCCTGCTGCTTCCGCTGGCTCTTCTGCTCCAC |
| C1981-C3-nt | | GCCGCTCGGCCCCAAGTGCAGCTCGTGGAGTCAGGCGGAGGACTGGTGCAG |
| Full CART | | CCCGGGGGCTCCCTGAGACTTTCCTGCGCGGCATCGGGTTTTACCTTCTCC |
| | | TCCTATGCTATGTCCTGGGTGCGCCAGGCCCCGGGAAAGGGACTGGAATGG |
| | | GTGTCCGCAATCAGCGGTAGCGGGGGCTCAACATACTACGCCGACTCCGTC |
| | | AAGGGTCGCTTCACTATTTCCCGGGACAACTCCAAGAATACCCTGTACCTC |
| | | CAAATGAACAGCCTCAGGGCCGAGGATACTGCCGTGTACTACTGCGCCAAA |
| | | GTCGGATACGATAGCTCCGGTTACTACCGGGACTACTACGGAATGGACGTG |
| | | TGGGGACAGGGCACCACCGTGACCGTGTCAAGCGGCGGAGGCGGTTCAGGA |
| | | GGGGGAGGCTCCGGCGGTGGAGGGTCCGAAATCGTCCTGACTCAGTCGCCT |
| | | GGCACTCTGTCGTTGTCCCCGGGGGAGCGCGCTACCCTGTCGTGTCGGGCG |
| | | TCGCAGTCCGTGTCGAGCTCCTACCTCGCGTGGTACCAGCAGAAGCCCGGA |
| | | CAGGCCCCTAGACTTCTGATCTACGGCACTTCTTCACGCGCCACCGGGATC |
| | | AGCGACAGGTTCAGCGGCTCCGGCTCCGGGACCGACTTCACCCTGACCATT |
| | | AGCCGGCTGGAGCCTGAAGATTTCGCCGTGTATTACTGCCAACACTACGGA |
| | | AACTCGCCGCCAAAGTTCACGTTCGGACCCGGAACCAAGCTGGAAATCAAG |
| | | ACCACTACCCCAGCACCGAGGCCACCCACCCCGGCTCCTACCATCGCCTCC |
| | | CAGCCTCTGTCCCTGCGTCCGGAGGCATGTAGACCCGCAGCTGGTGGGGCC |
| | | GTGCATACCCGGGGTCTTGACTTCGCCTGCGATATCTACATTTGGGCCCCT |
| | | CTGGCTGGTACTTGCGGGGTCCTGCTGCTTTCACTCGTGATCACTCTTTAC |
| | | TGTAAGCGCGGTCGGAAGAAGCTGCTGTACATCTTTAAGCAACCCTTCATG |
| | | AGGCCTGTGCAGACTACTCAAGAGGAGGACGGCTGTTCATGCCGGTTCCCA |
| | | GAGGAGGAGGAAGGCGGCTGCGAACTGCGCGTGAAATTCAGCCGCAGCGCA |
| | | GATGCTCCAGCCTACAAGCAGGGGCAGAACCAGCTCTACAACGAACTCAAT |
| | | CTTGGTCGGAGAGAGGAGTACGACGTGCTGGACAAGCGGAGAGGACGGGAC |
| | | CCAGAAATGGGCGGGAAGCCGCGCAGAAAGAATCCCCAAGAGGGCCTGTAC |
| | | AACGAGCTCCAAAAGGATAAGATGGCAGAAGCCTATAGCGAGATTGGTATG |
| | | AAAGGGGAACGCAGAAGAGGCAAAGGCCACGACGGACTGTACCAGGGACTC |
| | | AGCACCGCCACCAAGGACACCTATGACGCTCTTCACATGCAGGCCCTGCCG |
| | | CCTCGG |

BCMA_EBB-C1978-G4

| | | |
|---|---|---|
| BCMA_EBB- | 999 | MALPVTALLLPLALLLHAARPEVQLVESGGGLVQPGGSLRLSCAASGFTFS |
| C1978-G4-aa | | SYAMSWVRQAPGKGLEWVSAISGSGGSTYYADSVKGRFTISRDNSKNTLYL |
| Full CART | | QMNSLRAEDTAVYYCAKMGWSSGYLGAFDIWGQGTTVTVSSGGGGSGGGGS |
| | | GGGGSEIVLTQSPGTLSLSPGERATLSCRASQSVASSFLAWYQQKPGQAPR |
| | | LLIYGASGRATGIPDRFSGSGSGTDFTLTISRLEPEDFAVYYCQHYGGSPR |
| | | LTFGGGTKVDIKTTTPAPRPPTPAPTIASQPLSLRPEACRPAAGGAVHTRG |
| | | LDFACDIYIWAPLAGTCGVLLLSLVITLYCKRGRKKLLYIFKQPFMRPVQT |
| | | TQEEDGCSCRFPEEEEGGCELRVKFSRSADAPAYKQGQNQLYNELNLGRRE |
| | | EYDVLDKRRGRDPEMGGKPRRKNPQEGLYNELQKDKMAEAYSEIGMKGERR |
| | | RGKGHDGLYQGLSTATDKTYDALHMQALPPR |
| BCMA_EBB- | 1021 | ATGGCCCTCCCTGTCACCGCCCTGCTGCTTCCGCTGGCTCTTCTGCTCCAC |
| C1978-G4-nt | | GCCGCTCGGCCCGAAGTCCAACTGGTGGAGTCCGGGGGAGGGCTCGTGCAG |
| Full CART | | CCCGGAGGCAGCCTTCGCCTGTCGTGCGCCGCCTCCGGGTTCACGTTCTCA |
| | | TCCTACGCGATGTCGTGGGTCAGACAGGCACCAGGAAAGGGACTGGAATGG |
| | | GTGTCCGCCATTAGCGGCTCCGGCGGTAGCACCTACTATGCCGACTCAGTG |
| | | AAGGGAAGGTTCACTATCTCCCGCGACAACAGCAAGAACACCCTGTACCTC |
| | | CAAATGAACTCTCTGCGGGCCGAGGATACCGCGGTGTACTATTGCGCCAAG |
| | | ATGGGTTGGTCCAGCGGATACTTGGGAGCCTTCGACATTTGGGGACAGGGC |
| | | ACTACTGTGACCGTGTCCTCCGGGGGTGGCGGATCGGGAGGCGGCGGCTCG |
| | | GGTGGAGGGGGTTCCGAAATCGTGTTGACCCAGTCACCGGGAACCCTCTCG |
| | | CTGTCCCCGGGAGAACGGGCTACACTGTCATGTAGAGCGTCCCAGTCCGTG |
| | | GCTTCCTCGTTCCTGGCCTGGTACCAGCAGAAGCCGGGACAGGCACCCCGC |
| | | CTGCTCATCTACGGAGCCAGCGGCCGGGCGACCGGCATCCCTGACCGCTTC |
| | | TCCGGTTCCGGCTCGGGCACCGACTTTACTCTGACCATTAGCAGGCTTGAG |
| | | CCCGAGGATTTTGCCGTGTACTACTGCCAACACTACGGGGGGAGCCCTCGC |
| | | CTGACCTTCGGAGGCGGAACTAAGGTCGATATCAAAACCACTACCCCAGCA |
| | | CCGAGGCCACCCACCCCGGCTCCTACCATCGCCTCCCAGCCTCTGTCCCTG |
| | | CGTCCGGAGGCATGTAGACCCGCAGCTGGTGGGGCCGTGCATACCCGGGGT |
| | | CTTGACTTCGCCTGCGATATCTACATTTGGGCCCCTCTGGCTGGTACTTGC |
| | | GGGGTCCTGCTGCTTTCACTCGTGATCACTCTTTACTGTAAGCGCGGTCGG |
| | | AAGAAGCTGCTGTACATCTTTAAGCAACCCTTCATGAGGCCTGTGCAGACT |
| | | ACTCAAGAGGAGGACGGCTGTTCATGCCGGTTCCCAGAGGAGGAGGAAGGC |
| | | GGCTGCGAACTGCGCGTGAAATTCAGCCGCAGCGCAGATGCTCCAGCCTAC |
| | | AAGCAGGGGCAGAACCAGCTCTACAACGAACTCAATCTTGGTCGGAGAGAG |
| | | GAGTACGACGTGCTGGACAAGCGGAGAGGACGGGACCCAGAAATGGGCGGG |
| | | AAGCCGCGCAGAAAGAATCCCCAAGAGGGCCTGTACAACGAGCTCCAAAAG |
| | | GATAAGATGGCAGAAGCCTATAGCGAGATTGGTATGAAAGGGGAACGCAGA |
| | | AGAGGCAAAGGCCACGACGGACTGTACCAGGGACTCAGCACCGCCACCAAG |
| | | GACACCTATGACGCTCTTCACATGCAGGCCCTGCCGCCTCGG |

[0454] In one embodiment, the CAR molecule of the BCA CAR comprises (e.g., consists of) an amino acid sequence provided in Table 16, or Table 1 of WO2016/014565, or as otherwise described herein. In one embodiment, the CAR molecule of the BCA CAR comprises (e.g., consists of) an amino acid sequence of SEQ ID NO: 949, SEQ ID NO: 950, SEQ ID NO: 951, SEQ ID NO: 952, SEQ ID NO: 953, SEQ ID NO: 954, SEQ ID NO: 955, SEQ ID NO: 956, SEQ ID NO: 957, SEQ ID NO: 958, SEQ ID NO: 959, SEQ ID NO: 960, SEQ ID NO: 961, SEQ ID NO: 962, SEQ ID NO: 963, SEQ ID NO: 979, SEQ ID NO: 980, SEQ ID NO: 981, SEQ ID NO: 982, SEQ ID NO: 983, SEQ ID NO: 984, SEQ ID NO: 985, SEQ ID NO: 986, SEQ ID NO: 987, SEQ ID NO: 988, SEQ ID NO: 989, SEQ ID NO: 990, SEQ ID NO: 991, SEQ ID NO: 992, SEQ ID NO: 993, SEQ ID NO: 994, SEQ ID NO: 995, SEQ ID NO: 996, SEQ ID NO: 997, SEQ ID NO: 998, or SEQ ID NO: 999; or an amino acid sequence having at least one, two, three, four, five, 10, 15, 20 or 30 modifications (e.g., substitutions, e.g., conservative substitutions) but not more than 60, 50, or 40 modifications (e.g., substitutions, e.g., conservative substitutions) of an amino acid sequence of SEQ ID NO: 949, SEQ ID NO: 950, SEQ ID NO: 951, SEQ ID NO: 952, SEQ ID NO: 953, SEQ ID NO: 954, SEQ ID NO: 955, SEQ ID NO: 956, SEQ ID NO: 957, SEQ ID NO: 958, SEQ ID NO: 959, SEQ ID NO: 960, SEQ ID NO: 961, SEQ ID NO: 962, SEQ ID NO: 963, SEQ ID NO: 979, SEQ ID NO: 980, SEQ ID NO: 981, SEQ ID NO: 982, SEQ ID NO: 983, SEQ ID NO: 984, SEQ ID NO: 985, SEQ ID NO: 986, SEQ ID NO: 987, SEQ ID NO: 988, SEQ ID NO: 989, SEQ ID NO: 990, SEQ ID NO: 991, SEQ ID NO: 992, SEQ ID NO: 993, SEQ ID NO: 994, SEQ ID NO: 995, SEQ ID NO: 996, SEQ ID NO: 997, SEQ ID NO: 998, or SEQ ID NO: 999; or an amino acid sequence having 85%, 90%, 95%, 96%, 97%, 98%, 99% identity to an amino acid sequence of SEQ ID NO: 949, SEQ ID NO: 950, SEQ ID NO: 951, SEQ ID NO: 952, SEQ ID NO: 953, SEQ ID NO: 954, SEQ ID NO: 955, SEQ ID NO: 956, SEQ ID NO: 957, SEQ ID NO: 958, SEQ ID NO: 959, SEQ ID NO: 960, SEQ ID NO: 961, SEQ ID NO: 962, SEQ ID NO: 963, SEQ ID NO: 979, SEQ ID NO: 980, SEQ ID NO: 981, SEQ ID NO: 982, SEQ ID NO: 983, SEQ ID NO: 984, SEQ ID NO: 985, SEQ ID NO: 986, SEQ ID NO: 987, SEQ ID NO: 988, SEQ ID NO: 989, SEQ ID NO: 990, SEQ ID NO: 991, SEQ ID NO: 992, SEQ ID NO: 993, SEQ ID NO: 994, SEQ ID NO: 995, SEQ ID NO: 996, SEQ ID NO: 997, SEQ ID NO: 998, or SEQ ID NO: 999.

[0455] In one aspect, the cell of the invention (e.g., a cell comprising both a TA CAR and a BCA CAR) comprises a TA CAR molecule comprising an antigen binding domain that binds to a tumor antigen. In one embodiment, the TA CAR comprises a CAR molecule comprising a mesothelin antigen binding domain (e.g., a murine, human or humanized antibody or antibody fragment that specifically binds to mesothelin), a transmembrane domain, and an intracellular signaling domain (e.g., an intracellular signaling domain comprising a costimulatory domain and/or a primary signaling domain).

[0456] Exemplary TA CAR molecules that target mesothelin are described herein, and are provided in Table 11. The CAR molecules in Table 11 comprise a mesothelin antigen binding domain, e.g., an amino acid sequence of any mesothelin antigen binding domain provided in Table 2. The leader sequence is in bold and underlined, CDRs are underlined, and the linker sequence between the heavy and light chain of the antigen binding region is shaded in grey.

TABLE 11
Exemplary mesothelin CAR molecules

| | | SEQ |
|---|---|---|
| | | ID |
| Name | Amino Acid Sequence | NO: |
| M5 CAR | [chemical structure] | 286 |
| | APGQGLEWMGWINPNSGGTNYAQKFQGRVTMTRDTSISTAYMELSRLRSDDTAVYYCASG | |
| | [chemical structure] | |
| | ASQSIRYYLSWYQQKPGKARKLLIYTASILQNGVPSRFSGSGSGTDFTLTISSLQPEDFA | |
| | TYYCLQTYTTPDFGPGTKVEIKTTTPAPRPPTPAPTIASQPLSLRPEACRPAAGGAVHTR | |
| | GLDFACDIYIWAPLAGTCGVLLLSLVITLYCKRGRKKLLYIFKQPFMPPVQTTQEEDGCS | |
| | CRFPEEEEGGCELRVKFSRSADAPAYKQGQNQLYNELNLGRREEYDVLDKRRGRDPEMGG | |
| | KPRRKNPQEGLYNELQKDKMAEAYSEIGMKGERRRGKGHDGLYQGLSTATKDTYDALHMQ | |
| | ALPPR | |
| M11 CAR | [chemical structure] | 292 |
| | APGQGLEWMGWINPNSGGTNYAQNFQGRVTMTRDTSISTAYMELRRLRSDDTAVYYCASG | |
| | [chemical structure] | |
| | ASQSIRYYLSWYQQKPGKAPKLLIYTASILQNGVPSRFSGSGSGTDFTLTISSLQPEDFA | |
| | TYYCLQTYTTPDFGPGTKVEIKTTTPAPRPPTPAPTIASQPLSLRPEACRPAAGGAVHTR | |
| | GLDFACDIYIWAPLAGTCGVLLLSLVITLYCKRGRKKLLYIFKQPFMRPVQTTQEEDGCS | |
| | CRFPEEEEGGCELRVKFSRSADAPAYKQGQNQLYNELNLGRREEYDVLDKRRGRDPEMGG | |
| | KPRRKNPQEGLYNELQKDKMAEAYSEIGMKGERRRGKGHDGLYQGLSTATKDTYDALHMQ | |
| | ALPPR | |
| SS1 CAR | [chemical structure] | 306 |
| | QSHGKSLEWIGLITPYNGASSYNQKFRGKATLTVDKSSSTAYMDLLSLTSEDSAVYFCA | |
| | [chemical structure] | |
| | CSASSSVSYMHWYQQKSGTSPKRWIYDTSKLASGVPGRFSGSGSGNSYSLTISSVEAED | |
| | DATYYCQQWSGYPLTFGAGTKLEITTTPAPRPPTPAPTIASQPLSLRPEACRPAAGGAV | |
| | HTRGLDFACDIYIWAPLAGTCGVLLLSLVITLYCKRGRKKLLYIFKQPFMRPVQTTQEE | |
| | DGCSCRFPEEEEGGCELRVKFSRSADAPA | |
| M1 CAR | [chemical structure] | 282 |
| | APGQGLEWMGRINPNSGGTNYAQKFQGRVTMTRDTSISTAYMELSRLRSEDTAVYYCARG | |
| | [chemical structure] | |
| | CRASQSVSSNFAWYQQRPGQAPRLLIYDASNRATGIPPRFSGSGSGTDFTLTISSLEPED | |
| | FAAYYCHQRSNWLYTFGQGTKVDIKTTTPAPRPPTPAPTIASQPLSLRPEACRPAAGGAV | |
| | HTRGLDFACDIYIWAPLAGTCGVLLLSLVITLYCKRGRKKLLYIFKQPFMRPVQTTQEED | |
| | GCSCRFPEEEEGGCELRVKFSRSADAPAYKQGQNQLYNELNLGRREEYDVLDKRRGRDPE | |
| | MGGKPRRKNPQEGLYNELQKDKMAEAYSEIGMKGERRRGKGHDGLYQGLSTATKDTYDAL | |
| | HMQALPPR | |
| M2 CAR | [chemical structure] | 283 |
| | APGQGLEWMGWINPNSGGTNYAQKFQGRVTMTRDTSISTAYMELSRLRSDDTAVYYCARD | |
| | [chemical structure] | |
| | SVGDRVTITCQASQDISNSLNWYQQKAGKAPKLLIYDASTLETGVPSRFSGSGSGTDFSF | |
| | TISSLQPEDIATYYCQQHDNLPLTFGQGTKVEIKTTTPAPRPPTPAPTIASQPLSLRPEA | |
| | CRPAAGGAVHTRGLDFACDIYIWAPLAGTCGVLLLSLVITLYCKRGRKKLLYIFKQPFMR | |
| | PVQTTQEEDGCSCRFPEEEEGGCELRVKFSRSADAPAYKQGQNQLYNELNLGRREEYDVL | |
| | DKRRGRDPEMGGKPRRKNPQEGLYNELQKDKMAEAYSEIGMKGERRRGKGHDGLYQGLST | |
| | ATKDTYDALHMQALPPR | |
| M3 CAR | [chemical structure] | 284 |
| | APGQGLEWMGWINPNSGGTNYAQKFQGRVTMTRDTSISTAYMELSRLRSDDTAVYYCARG | |
| | [chemical structure] | |
| | TITCRASQSINTYLNWYQHKPGKAPKLLIYAASSLQSGVPSRFSGSGSGTDFTLTISSLQ | |
| | PEDFATYYCQQSFSPLTFGGGTKLEIKTTTPAPRPPTPAPTIASQPLSLRPEACRPAAGG | |
| | AVHTRGLDFACDIYIWAPLAGTCGVLLLSLVITLYCKRGRKKLLYIFKQPFMRPVQTTQE | |
| | EDGCSCRFPEEEEGGCELRVKFSRSADAPAYKQGQNQLYNELNLGRREEYDVLDKRRGRD | |
| | PEMGGKPRRKNPQEGLYNELQKDKMAEAYSEIGMKGERRRGKGHDGLYQGLSTATKDTYD | |
| | ALHMQALPPR | |
| M4 CAR | [chemical structure] | 285 |
| | VPGKGLVWVSRINTDGSTTTYADSVEGRFTISRDNAKNTLYLQMNSLRDDDTAVYYCVGG | |
| | [chemical structure] | |
| | SQSISDRLAWYQQKPGKAPKLLIYKASSLESGVPSRFSGSGSGTEFTLTISSLQPDDFAV | |
| | YYCQQYGHLPMYTFGQGTKVEIKTTTPAPRPPTPAPTIASQPLSLRPEACRPAAGGAVHT | |
| | RGLDFACDIYIWAPLAGTCGVLLLSLVITLYCKRGRKKLLYIFKQPFMRPVQTTQEEDGC | |
| | SCRFPEEEEGGCELRVKFSRSADAPAYKQGQNQLYNELNLGRREEYDVLDKRRGRDPEMG | |
| | GKPRRKNPQEGLYNELQKDKMAEAYSEIGMKGERRRGKGHDGLYQGLSTATKDTYDALHM | |
| | QALPPR | |
| M6 CAR | [chemical structure] | 287 |
| | APGQGLEWMGIINPSGGSTSYAQKFQGRVTMTRDTSTSTVYMELSSLRSEDTAVYYCARY | |
| | [chemical structure] | |
| | SVGDPVTITCRASQGVGRWLAWYQQKPGTAPKLLIYAASTLQSGVPSRFSGSGSGTDFTL | |
| | TINNLQPEDFATYYCQQANSFPLTFGGGTRLEIKTTTPAPRPPTPAPTIASQPLSLRPEA | |
| | CRPAAGGAVHTRGLDFACDIYIWAPLAGTCGVLLLSLVITLYCKRGRKKLLYIFKQPFMR | |
| | PVQTTQEEDGCSCRFPEEEEGGCELRVKFSRSADAPAYKQGQNQLYNELNLGRREEYDVL | |
| | DKRRGRDPEMGGKPRRKNPQEGLYNELQKDKMAEAYSEIGMKGERRRGKGHDGLYQGLST | |
| | ATKDTYDALHMQALPPR | |
| M7 CAR | [chemical structure] | 288 |
| | APGKGLEWVAVISYDGSNKYYADSVKGRFTISRDNSKNTLYLQMNSLRAEDTAVYYCARW | |
| | [chemical structure] | |
| | AILSCRASQSVYTKYLGWYQQKPGQAPRLLIYDASTRATGIPDRFSGSGSGTDFTLTTNR | |
| | LEPEDFAVYYCQHYGGSPLITFGQGTRLEIKTTTPAPRPPTPAPTIASQPLSLRPEACRP | |
| | AAGGAVHTRGLDFACDIYIWAPLAGTCGVLLLSLVITLYCKRGRKKLLYIFKQPFMRPVQ | |
| | TTQEEDGCSCRFPEEEEGGCELRVKFSRSADAPAYKQGQNQLYNELNLGRREEYDVLDKR | |
| | RGRDPEMGGKPRRKNPQEGLYNELQKDKMAEAYSEIGMKGERRRGKGHDGLYQGLSTATK | |
| | DTYDALHMQALPPR | |
| M8 CAR | [chemical structure] | 289 |
| | APGQGLEWMGWINPNSGGTNYAQKFQGRVTMTRDTSISTAYMELSRLRSDDTAVYYCARD | |
| | [chemical structure] | |
| | ITCRASQDSGTWLAWYQQKPGKAPNLLMYDASTLEDGVPSRFSGSASGTEFTLTVNRLQP | |
| | EDSATYYCQQYNSYPLTFGGGTKVDIKTTTPAPRPPTPAPTIASQPLSLRPEACRPAAGG | |
| | AVHTRGLDFACDIYIWAPLAGTCGVLLLSLVITLYCKRGRKKLLYIFKQPFMRPVQTTQE | |
| | EDGCSCRFPEEEEGGCELRVKFSRSADAPAYKQGQNQLYNELNIGRREEYDVLDKRRGRD | |
| | PEMGGKPRRKNPQEGLYNELQKDKMAEAYSEIGMKGERRRGKGHDGLYQGLSTATKDTYD | |
| | ALHMQALPPR | |
| M9 CAR | [chemical structure] | 290 |
| | APGQGLEWMGIINPSGGSTGYAQKFQGRVTMTRDTSTSTVHMELSSLRSEDTAVYYCARG | |
| | [chemical structure] | |
| | VTITCRASQDISSALAWYQQKPGTPPKLLIYDASSLESGVPSRESGSGSGTDFILTISSL | |
| | QPEDFATYYCQQFSSYPLTFGGGTRLEIKTTTPAPRPPTPAPTIASQPLSLRPEACRPAA | |
| | GGAVHTRGLDFACDIYIWAPLAGTCGVLLLSLVITLYCKRGRKKLLYIFKQPFMRPVQTT | |
| | QEEDGCSCRFPEEEEGGCELRVKFSRSADAPAYKQGQNQLYNELNLGRREEYDVLDKRRG | |
| | RDPEMGGKPRRKNPQEGLYNELQKDKMAEAYSEIGMKGERRRGKGHDGLYQGLSTATKDT | |
| | YDALHMQALPPR | |
| M10 CAR | [chemical structure] | 291 |
| | APGQGLEWMGWISAYNGNTNYAQKLQGRVTMTTDTSTSTAYMELRSLRSDDTAVYYCARV | |
| | [chemical structure] | |
| | RATISCKSSHSVLYNRNNKNYLAWYQQKPGQPPKLLFYWASTRKSGVPDRFSGSGSGTDF | |
| | TLTISSLQPEDFATYFCQQTQTFPLTFGQGTRLEINTTTPAPRPPTPAPTIASQPLSLRP | |
| | EACRPAAGGAVHTRGLDFACDIYIWAPLAGTCGVLLLSLVITLYCKRGRKKLLYIFKQPF | |
| | MRPVQTTQEEDGCSCRFPEEEEGGCELRVKFSPSADAPAYKQGQNQLYNELNLGRREEYD | |
| | VLDKRRGRDPEMGGKPRRKNPQEGLYNELQKDKMAEAYSEIGMKGERRRGKGHDGLYQGL | |
| | STATKDTYDALHMQALPPR | |
| M12 CAR | [chemical structure] | 293 |
| | APGQGLEWMGRINPNSGGTNYAQKFQGRVTMTTDTSTSTAYMELRSLRSDDTAVYYCART | |
| | [chemical structure] | |
| | TCRASQSISTWLAWYQQKPGKAPNLLIYKASTLESGVPSRFSGSGSGTEFTLTISSLQPD | |
| | DFATYYCQQYNTYSPYTFGQGTKLEIKTTTPAPRPPTPAPTIASQPLSLRPEACRPAAGG | |
| | AVHTRGLDFACDIYIWAPLAGTCGVLLLSLVITLYCKRGRKKLLYIFKQPFMRPVQTTQE | |
| | EDGCSCRFPEEEEGGCELRVKFSRSADAPAYKQGQNQLYNELNLGRREEYDVLDKRRGRD | |
| | PEMGGKPRRKNPQEGLYNELQKDKMAEAYSEIGMKGERRRGKGHDGLYQGLSTATKDTYD | |
| | ALHMQALPPR | |
| M13 CAR | [chemical structure] | 294 |
| | APGKGLEWVSYIGRSGSSMYYADSVKGRFTFSRDNAKNSLYLQMNSLRAEDTAVYYCAAS | |
| | [chemical structure] | |
| | ATLSCRASQSVTSNYLAWYQQKPGQAPRLLLFGASTRATGIPDRFSGSGSGTDFTLTINR | |
| | LEPEDFAMYYCQQYGSAPVTFGQGTKLEIKTTTPAPRPPTPAPTIASQPLSLRPEACRPA | |
| | AGGAVHTRGLDFACDIYIWAPLAGTCGVLLLSLVITLYCKRGRKKLLYIFKQPFMRPVQT | |
| | TQEEDGCSCRFPEEEEGGCELRVKFSRSADAPAYKQGQNQLYNELNLGRREEYDVLDKRR | |
| | GRDPEMGGKPRRKNPQEGLYNELQKDKMAEAYSEIGMKGERRRGKGHDGLYQG1STATKD | |
| | TYDALHMQALPPR | |
| M14 CAR | [chemical structure] | 295 |
| | APGQGLEWMGIINPSGGSRAYAQKFQGRVTMTRDTSTSTVYMELSSLRSDDTAMYYCART | |
| | [chemical structure] | |
| | RVTITCRASENVNIWLAWYQQKPGKAPKLLIYKSSSLASGVPSRFSGSGSGAEFTLTISS | |
| | LQPDDFATYYCQQYQSYPLTFGGGTKVDIKTTTPAPRPPTPAPTIASQPLSLRPEACRPA | |
| | AGGAVHTRGLDFACDIYIWAPLAGTCGVLLLSLVITLYCKRGRKKLLYIFKQPFMRPVQT | |
| | TQEEDGCSCRFPEEEEGGCELRVKFSRSADAPAYKQGQNQLYNELNLGRREEYDVLDKRR | |
| | GRDPEMGGKPRRKNPQEGLYNELQKDKMAEAYSEIGMKGERRRGKGHDGLYQGLSTATKD | |
| | TYDALHMQALPPR | |
| M15 CAR | [chemical structure] | 296 |
| | APGKGLEWVSGISWNSGSIGYADSVKGRFTISRDNAKNSLYLQMNSLRAEDTAVYYCAKD | |
| | [chemical structure] | |
| | QGDALRSYYASWYQQKPGQAPMLVIYGKNNRPSGIPDRFSGSDSGDTASLTITGAQAEDE | |
| | ADYYCNSRDSSGYPVFGTGTKVTVLTTTPAPRPPTPAPTIASQPLSLRPEACRPAAGGAV | |
| | HTRGLDFACDIYIWAPLAGTCGVLLLSLVITLYCKRGRKKLLYIFKQPFMRPVQTTQEED | |
| | GCSCRFPFEEEGGCELRVKFSPSADAPAYKQGQNQLYNELNLGRREEYDVLDKRRGRDPE | |
| | MGGKPRRKNPQEGLYNELQKDKMAEAYSEIGMKGERRRGKGHDGLYQGLSTATKDTYDAL | |
| | HMQALPPR | |
| M16 CAR | [chemical structure] | 297 |
| | APGKGLEWVSGISWNSGSTGYADSVKGRFTISRDNAKNSLYLQMNSLRAEDTALYYCAKD | |
| | [chemical structure] | |
| | CQGDSLRSYYASWYQQKPGQAPVLVIFGRSRRPSGIPDRFSGSSSGNTASLIITGAQAED | |
| | EADYYCNSRDNTANHYVFGTGTKLTVLTTTPAPRPPTPAPTIASQPLSLRPEACRPAAGG | |
| | AVHTRGLDFACDIYIWAPLAGTCGVLLLSLVITLYCKRGRKKLLYIFKQPFMRPVQTTQE | |
| | EDGCSCRFPEEEEGGCELRVKFSRSADAPAYKQGQNQLYNELNLGRREEYDVLDKRRGRD | |
| | PEMGGKPRRKNPQEGLYNELQKDKMAEAYSEIGMKGERRRGKGHDGLYQGLSTATKDTYD | |
| | ALHMQALPPR | |
| M17 CAR | [chemical structure] | 298 |
| | APGKGLEWVSGISWNSGSTGYADSVKGRFTISRDNAKNSLYLQMNSLRAEDTALYYCAKD | |
| | [chemical structure] | |
| | CQGDSLPSYYASWYQQKPGQAPVLVIYGKNNRPSGIPDRFSGSSSGNTASLTITGAQAED | |
| | EADYYCNSRGSSGNHYVFGTGTKVTVLTTTPAPRPPTPAPTIASQPLSLRPEACRPAAGG | |
| | AVHTRGLDFACDIYIWAPLAGTCGVLLLSLVITLYCKRGRKKLLYIFKQPFMRPVQTTQE | |
| | EDGCSCRFPEEEEGGCELRVKFSRSADAPAYKQGQNQLYNELNLGRREEYDVLDKRRGRD | |
| | PEMGGKPRRKNPQEGLYNELQKDKMAEAYSEIGMKGERRRGKGHDGLYQGLSTATKDTYD | |
| | ALHMQALPPR | |
| M18 CAR | [chemical structure] | 299 |
| | APGKGLVWVSRINSDGSSTSYADSVKGRFTISRDNAKNTLYLQMNSLRAEDTAVYYCVRT | |
| | [chemical structure] | |
| | RATLSCRASQSVSSNYLAWYQQKTGQPPRLLIYDVSTRATGIPARFSGGGSGTDFTLTIS | |
| | SLEPEDFAVYYCQQRSNWPPWTFGQGTKVEIKTTTPAPRPPTPAPTIASQPLSLRPEACR | |
| | PAAGGAVHTRGLDFACDIYIWAPLAGTCGVLLLSLVITLYCKRGRKKLLYIFKQPFMRPV | |
| | QTTQEEDGCSCRFPEEEEGGCELRVKFSRSADAPAYKQGQNQLYNELNLGRREEYDVLDK | |
| | RRGRDPEMGGKPRRKNPQEGLYNELQKDKMAEAYSEIGMKGERRRGKGHDGLYQGLSTAT | |
| | KDTYDALHMQALPPR | |
| M19 CAR | [chemical structure] | 300 |
| | APGKGLEWVAVISYDGSNKYYADSVKGRFTISRDNSKNTLYLQMNSLRAEDTAVYYCAKG | |
| | [chemical structure] | |
| | AILSCRASQSVYTKYLGWYQQKPGQAPRLLIYDASTRATGIPDRFSGSGSGTDFTLTINR | |
| | LEPEDFAVYYCQHYGGSPLITFGQGTKVDIKTTTPAPRPPTPAPTIASQPLSLRPEACRP | |
| | AAGGAVHTRGLDFACDIYIWAPLAGTCGVLLLSLVITLYCKRGRKKLLYIFKQPFMRPVQ | |
| | TTQEEDGCSCRFPEEEEGGCELRVKFSRSADAPAYKQGQNQLYNELNLGRREEYDVLDKR | |
| | RGRDPEMGGKPRRKNPQEGLYNELQKDKMAEAYSEIGMKGERRRGKGHDGLYQGLSTATK | |
| | DTYDALHMQALPPR | |
| M20 CAR | [chemical structure] | 301 |
| | APGKGLEWVSAISGSGGSTYYADSVKGRFTISRDNSKNTLYLQMNSLRAEDTAVYYCAKR | |
| | [chemical structure] | |
| | RVTITCRASQSISSYLNWYQQKPGKAPKLLIYAASSLQSGVPSRFSGSGSGTDFTLTISS | |
| | LQPEDFATYYCQQSYSIPLTFGQGTKVEIKTTTPAPRPPTPAPTIASQPLSLRPEACRPA | |
| | AGGAVHTRGLDFACDIYIWAPLAGTCGVLLLSLVITLYCKRGRKKLLYIFKQPFMRPVQT | |
| | TQEEDGCSCRFPEEEEGGCELRVKFSRSADAPAYKQGQNQLYNELNLGRREEYDVLDKRR | |
| | GRDPEMGGKPRRKNPQEGLYNELQKDKMAEAYSEIGMKGERRRGKGHDGLYQGLSTATKD | |
| | TYDALHMQALPPR | |
| M21 CAR | [chemical structure] | 302 |
| | APGQGLEWMGIINPSGGSTSYAQKFQGRVTMTRDTSTSTVYMELSNLRSEDTAVYYCARS | |
| | [chemical structure] | |
| | TITCRASQSISSWLAWYQQKPGKAPKLLIYKASSLESGVPSRFSGSGSGTEFTLTISSLQ | |
| | PDDFATYYCQQYSSYPLTFGGGTRLEIKTTTPAPRPPTPAPTIASQPLSLRPEACRPAAG | |
| | GAVHTRGLDFACDIYIWAPLAGTCGVLLLSLVITLYCKRGRKKLLYIFKQPFMRPVQTTQ | |
| | EEDGCSCRFPEEEEGGCELRVKFSRSADAPAYKQGQNQLYNELNLGRREEYDVLDKRRGR | |
| | DPEMGGKPRRKNPQEGLYNELQKDKMAEAYSEIGMKGERRRGKGHDGLYQGLSTATKDTY | |
| | DALHMQALPPR | |
| M22 CAR | [chemical structure] | 303 |
| | APGQGPEWMGVINPTTGPATGSPAYAQMLQGRVTMTRDTSTRTVYMELRSLRFEDTAVYY | |
| | [chemical structure] | |
| | SVGDRVTITCRASQGISDYSAWYQQKPGKAPKLLIYAASTLQSGVPSRFSGSGSGTDFTL | |
| | TISYLQSEDFATYYCQQYYSYPLTFGGGTKVDIKTTTPAPRPPTPAPTIASQPLSLRPEA | |
| | CRPAAGGAVHTRGLDFACDIYIWAPLAGTCGVLLLSLVITLYCKRGRKKLLYIFKQPFMR | |
| | PVQTTQEEDGCSCRFPEEEEGGCELRVKFSRSADAPAYKQGQNQLYNELNLGRREEYDVL | |
| | DKRRGRDPEMGGKPRRKNPQEGLYNELQKDKMAEAYSEIGMKGERRRGKGHDGLYQGLST | |
| | ATKDTYDALHMQALPPR | |
| M23 CAR | [chemical structure] | 304 |
| | APGQGLEWMGIINPSGGYTTYAQKFQGRLTMTRDTSTSTVYMELSSLRSEDTAVYYCARI | |
| | [chemical structure] | |
| | RVTITCRASENVNIWLAWYQQKPGKAPKLLIYKSSSLASGVPSRFSGSGSGAEFTLTISS | |
| | LQPDDFATYYCQQYQSYPLTFGGGTKVDIKTTTPAPRPPTPAPTIASQPLSLRPEACRPA | |
| | AGGAVHTRGLDFACDIYTWATLAGTCGVLLLSLVITLYCKRGRKKLLYIFKQPFMRPVQT | |
| | TQEEDGCSCRFPEEEEGGCELRVKFSRSADAPAYKQGQNQDYNELNLGRREEYDVLDKRR | |
| | GRDPEMGGKPRRKNPQEGLYNELQKDKMAEAYSEIGMKGERRRGKGHDGLYQGLSTATKD | |
| | TYDALHMQATPPR | |
| M24 CAR | [chemical structure] | 305 |
| | RQPPGKALEWLALISWADDKRYRPSLRSRLDITRVTSKDQVVLSMTNMQPEDTATYYCAL | |
| | [chemical structure] | |
| | ITCRASRGISSALAWYQQKPGKPPKLLIYDASSLESGVPSRFSGSGSGTDFTLTIDSLEP | |
| | EDFATYYCQQSYSTPWTFGQGTKVDIKTTTPAPRPPTPAPTIASQPLSLRPEACRPAAGG | |
| | AVHTRGLDFACDIYIWAPLAGTCGVLLLSLVITLYCKRGRKKLLYIFKQPFMRPVQTTQE | |
| | EDGCSCRFPEEEEGGCELRVKFSRSADAPAYKQGQNQLYNELNLGRREEYDVLDKRRGRD | |
| | PEMGGKPRRKNPQEGLYNELQKDKMAEAYSEIGMKGERRRGKGHDGLYQGLSTATKDTYD | |
| | ALHMQALPPR | |

[0457] In one embodiment, the cell of the invention (e.g., a cell comprising both a TA CAR and a BCA CAR) comprises a TA CAR molecule that binds mesothelin, and comprises (e.g., consists of) an amino acid sequence as provided in Table 11 and Table 2 of International Publication No. WO2015/090230, filed Dec. 19, 2014; incorporated herein by reference. In one embodiment, the TA CAR molecule comprises (e.g., consists of) an amino acid sequence of SEQ ID NO: 282, SEQ ID NO: 283, SEQ ID NO: 284, SEQ ID NO: 285, SEQ ID NO: 286, SEQ ID NO: 287, SEQ ID NO: 288, SEQ ID NO: 289, SEQ ID NO: 290, SEQ ID NO: 291, SEQ ID NO: 292, SEQ ID NO: 293, SEQ ID NO: 294, SEQ ID NO: 295, SEQ ID NO: 296, SEQ ID NO: 297, SEQ ID NO: 298, SEQ ID NO: 299, SEQ ID NO: 300, SEQ ID NO: 301, SEQ ID NO: 302, SEQ ID NO: 303, SEQ ID NO: 304, SEQ ID NO: 305, or SEQ ID NO: 306; or an amino acid sequence having at least one, two, three, four, five, 10, 15, 20 or 30 modifications (e.g., substitutions, e.g., conservative substitutions) but not more than 60, 50, or 40 modifications (e.g., substitutions, e.g., conservative substitutions) of an amino acid sequence of SEQ ID NO: 282, SEQ ID NO: 283, SEQ ID NO: 284, SEQ ID NO: 285, SEQ ID NO: 286, SEQ ID NO: 287, SEQ ID NO: 288, SEQ ID NO: 289, SEQ ID NO: 290, SEQ ID NO: 291, SEQ ID NO: 292, SEQ ID NO: 293, SEQ ID NO: 294, SEQ ID NO: 295, SEQ ID NO: 296, SEQ ID NO: 297, SEQ ID NO: 298, SEQ ID NO: 299, SEQ ID NO: 300, SEQ ID NO: 301, SEQ ID NO: 302, SEQ ID NO: 303, SEQ ID NO: 304, SEQ ID NO: 305, or SEQ ID NO: 306; or an amino acid sequence having 85%, 90%, 95%, 96%, 97%, 98%, 99% identity to an amino acid sequence of SEQ ID NO: 282, SEQ ID NO: 283, SEQ ID NO: 284, SEQ ID NO: 285, SEQ ID NO: 286, SEQ ID NO: 287, SEQ ID NO: 288, SEQ ID NO: 289, SEQ ID NO: 290, SEQ ID NO: 291, SEQ ID NO: 292, SEQ ID NO: 293, SEQ ID NO: 294, SEQ ID NO: 295, SEQ ID NO: 296, SEQ ID NO: 297, SEQ ID NO: 298, SEQ ID NO: 299, SEQ ID NO: 300, SEQ ID NO: 301, SEQ ID NO: 302, SEQ ID NO: 303, SEQ ID NO: 304, SEQ ID NO: 305, or SEQ ID NO: 306.

[0458] In one aspect, the cell of the invention (e.g., a cell comprising both a TA CAR and a BCA CAR) comprises a TA CAR molecule comprising an antigen binding domain that binds to a tumor antigen. In one embodiment, the TA CAR comprises a CAR molecule comprising a EGFRvII antigen binding domain (e.g., a murine, human or humanized antibody or antibody fragment that specifically binds to mesothelin), a transmembrane domain, and an intracellular signaling domain (e.g., an intracellular signaling domain comprising a costimulatory domain and/or a primary signaling domain).

[0459] Exemplary TA CAR molecules that target EGFRvIII are described herein, and are provided in Table 17, or in Table 2 of WO/2014/130657 or as described in WO2016/014789.

TABLE 17
Humanized EGFRvIII CAR Constructs. Sequences are provided with a leader, and
the CDRs are underlined. Nt stands for nucleic acid and aa stands for amino acid

| | | |
|---|---|---|
| | SEQ ID | |
| Name | NO: | Sequence |

CAR 1

| | | |
|---|---|---|
| CAR 1- | 1042 | atggccctccctgtcaccgccctgctgcttccgctggctcttctgctccacgccgctcggcc |
| Full-nt | | cgagatccagctggtgcagtcgggagctgaagtcaaaaagcctggcgcaaccgtcaagatct |
| | | cgtgcaaaggatcagggttcaacatcgaggactactacatccattgggtgcaacaggcaccc |
| | | ggaaaaggcctggagtggatggggaggattgacccagaaaatgacgaaaccaagtacggacc |
| | | gatcttccaaggacgggtgaccatcacggctgacacttccactaacaccgtctacatggaac |
| | | tctcgagccttcgctcggaagataccgcggtgtactactgcgcctttagaggtggagtctac |
| | | tggggacaagggactaccgtcaccgtgtcgtcaggtggcggaggatcaggcggaggcggctc |
| | | cggtggaggaggaagcggaggaggtggctccgacgtggtgatgacgcagtcaccggactcct |
| | | tggcggtgagcctgggtgaacgcgccactatcaactgcaagagctcccagagcttgctggac |
| | | tccgatggaaagacttatctcaattggctgcaacagaagcctggccagccgccaaagagact |
| | | catctcactggtgagcaagctggatagcggagtgccagatcggttttcgggatcgggctcag |
| | | gcaccgacttcaccctgactatttcctccctccaagccgaggatgtggccgtctactactgt |
| | | tggcaggggactcacttcccggggaccttcggtggaggcactaaggtggagatcaaaaccac |
| | | taccccagcaccgaggccacccaccccggctcctaccatcgcctcccagcctctgtccctgc |
| | | gtccggaggcatgtagacccgcagctggtggggccgtgcatacccggggtcttgacttcgcc |
| | | tgcgatatctacatttgggcccctctggctggtacttgcggggtcctgctgctttcactcgt |
| | | gatcactctttactgtaagcgcggtcggaagaagctgctgtacatctttaagcaacccttca |
| | | tgaggcctgtgcagactactcaagaggaggacggctgttcatgccggttcccagaggaggag |
| | | gaaggcggctgcgaactgcgcgtgaaattcagccgcagcgcagatgctccagcctacaagca |
| | | ggggcagaaccagctctacaacgaactcaatcttggtcggagagaggagtacgacgtgctgg |
| | | acaagcggagaggacgggacccagaaatgggcgggaagccgcgcagaaagaatccccaagag |
| | | ggcctgtacaacgagctccaaaaggataagatggcagaagcctatagcgagattggtatgaa |
| | | aggggaacgcagaagaggcaaaggccacgacggactgtaccagggactcagcaccgccacca |
| | | aggacacctatgacgctcttcacatgcaggccctgccgcctcgg |
| CAR 1- | 1043 | malpvtalllplalllhaarpeiqlvqsgaevkkpgatvkisckgsgfniedyyihwvqqap |
| Full-aa | | gkglewmgridpendetkygpifqgrvtitadtstntvymelsslrsedtavyycafrggvy |
| | | wgqgttvtvssggggsggggsggggsggggsdvvmtqspdslavslgeratinckssgslld |
| | | sdgktylnwlqqkpgqppkrlislvskldsgvpdrfsgsgsgtdftltisslqaedvavyyc |
| | | wqgthfpgtfgggtkveiktttpaprpptpaptiasqplslrpeacrpaaggavhtrgldfa |
| | | cdiyiwaplagtcgvlllslvitlyckrgrkkllyifkqpfmrpvqttqeedgcscrfpeee |
| | | eggcelrvkfsrsadapaykqgqnqlynelnlgrreeydvldkrrgrdpemggkprrknpqe |
| | | glynelqkdkmaeayseigmkgerrrgkghdglyqglstatkdtydalhmqalppr |

CAR 2

| | | |
|---|---|---|
| CAR 2- | 1048 | atggccctccctgtaccgccctgctgcttccgctggctcttctgctccacgccgctcggccc |
| Full-nt | | gacgtggtcatgactcaaagcccagattccttggctgtctcccttggagaaagagcaacgat |
| | | caattgcaaaagctcgcagtccctgttggactccgatggaaaaacctacctcaactggctgc |
| | | agcagaagccgggacaaccaccaaagcggctgatttccctcgtgtccaagctggacagcggc |
| | | gtgccggatcgcttctcgggcagcggctcgggaaccgattttactctcactatttcgtcact |
| | | gcaagcggaggacgtggcggtgtattactgctggcagggcactcacttcccgggtacttttg |
| | | gtggaggtaccaaagtcgaaatcaagggtggaggcgggagcggaggaggcgggtcgggagga |
| | | ggaggatcgggtggcggaggctcagaaatccagctggtgcagtcaggtgccgaagtgaagaa |
| | | gcctggggccacggtgaagatctcgtgcaaggggagcggattcaacatcgaggattactaca |
| | | tccattgggtgcaacaggcccctggcaaagggctggaatggatgggaaggatcgaccccaag |
| | | aatgacgagactaagtacggcccgatcttccaaggacgggtgaccatcactgcagacacttc |
| | | aaccaacaccgtctacatggaactctcctcgctgcgctccgaggacaccgccgtgtactact |
| | | gtgctttcagaggaggagtctactggggacagggaacgaccgtgaccgtcagctcaaccact |
| | | accccagcaccgaggccacccaccccggctcctaccatcgcctcccagcctctgtccctgcg |
| | | tccggaggcatgtagacccgcagctggtggggccgtgcatacccggggtcttgacttcgcct |
| | | gcgatatctacatttgggcccctctggctggtacttgcggggtcctgctgctttcactcgtg |
| | | atcactctttactgtaagcgcggtcggaagaagctgctgtacatctttaagcaacccttcat |
| | | gaggcctgtgcagactactcaagaggaggacggctgttcatgccggttcccagaggaggagg |
| | | aaggcggctgcgaactgcgcgtgaaattcagccgcagcgcagatgctccagcctacaagcag |
| | | gggcagaaccagctctacaacgaactcaatcttggtcggagagaggagtacgacgtgctgga |
| | | caagcggagaggacgggacccagaaatgggcgggaagccgcgcagaaagaatccccaagagg |
| | | gcctgtacaacgagctccaaaaggataagatggcagaagcctatagcgagattggtatgaaa |
| | | ggggaacgcagaagaggcaaaggccacgacggactgtaccagggactcagcaccgccaccaa |
| | | ggacacctatgacgctcttcacatgcaggccctgccgcctcgg |
| CAR 2- | 1049 | malpvtalllplalllhaarpdvvmtqspdslavslgerantinckssqslldsdgktylnw |
| Full-aa | | lqqkpgqppkrlislvskldsgvpdrfsgsgsgtdftltisslqaedvavyycwqgthfpgt |
| | | fgggtkveikggggsggggsggggsggggseiqlvqsgaevkkpgatvkisckgsgfniedy |
| | | yihwvqqapgkglewmgridpendetkygpifqgrvtitadtstntvymelsslrsedtavy |
| | | ycafrggvywgqgttvtvsstttpaprpptpaptiasqplslrpeacrpaaggavhtrgldf |
| | | acdiyiwaplagtcgvlllslvitlyckrgrkkllyifkqpfmrpvqttqeedgcscrfpee |
| | | eeggcelrvkfsrsadapaykqgqnqlynelnlgrreeydvldkrrgrdpemggkprrknpq |
| | | eglynelqkdkmaeayseigmkgerrrgkghdglyqglstatkdtydalhmqalppr |

CAR 3

| | | |
|---|---|---|
| CAR 3- | 1054 | atggccctccctgtcaccgccctgctgcttccgctggctcttctgctccacgccgctcggcc |
| Full-nt | | cgaaatccagctggtgcaaagcggagccgaggtgaagaagcccggagaatccctgcgcatct |
| | | cgtgtaagggttccggctttaacatcgaggattactacatccactgggtgagacagatgccg |
| | | ggcaaaggtctggaatggatgggccgcatcgacccggagaacgacgaaaccaaatacggacc |
| | | aatcttccaaggacatgtgactatttccgcggatacctccatcaacactgtctacttgcagt |
| | | ggagctcgctcaaggcgtcggataccgccatgtactactgcgcattcagaggaggtgtgtac |
| | | tggggccagggcactacggtcaccgtgtcctcgggaggtggagggtcaggaggcggaggctc |
| | | gggcggtggaggatcaggcggaggaggaagcgatgtggtcatgactcaatccccactgtcac |
| | | tgcctgtcactctggggcaaccggcttccatctcatgcaagtcaagccaatcgctgctcgac |
| | | tccgacggaaaaacctacctcaattggcttcagcagcgcccaggccagtcgcctcggaggct |
| | | gatctcactcgtgtcgaagcttgactccggggtgccggatcggtttagcggaagcggatcgg |
| | | ggaccgacttcacgttgaagattagccgggtggaagccgaggacgtgggagtctattactgc |
| | | tggcaggggacccacttcccggggactttcggaggaggcaccaaagtcgagattaagaccac |
| | | taccccagcaccgaggccacccaccccggctcctaccatcgcctcccagcctctgtccctgc |
| | | gtccggaggcatgtagacccgcagctggtggggccgtgcatacccggggtcttgacttcgcc |
| | | tgcgatatctacatttgggcccctctggctggtacttgcggggtcctgctgctttcactcgt |
| | | gatcactctttactgtaagcgcggtcggaagaagctgctgtacatctttaagcaacccttca |
| | | tgaggcctgtgcagactactcaagaggaggacggctgttcatgccggttcccagaggaggag |
| | | gaaggcggctgcgaactgcgcgtgaaattcagccgcagcgcagatgctccagcctacaagca |
| | | ggggcagaaccagctctacaacgaactcaatcttggtcggagagaggagtacgacgtgctgg |
| | | acaagcggagaggacgggacccagaaatgggcgggaagccgcgcagaaagaatccccaagag |
| | | ggcctgtacaacgagctccaaaaggataagatggcagaagcctatagcgagattggtatgaa |
| | | aggggaacgcagaagaggcaaaggccacgacggactgtaccagggactcagcaccgccacca |
| | | aggacacctatgacgctcttcacatgcaggccctgccgcctcgg |
| CAR 3- | 1055 | malpvtalllplalllhaarpeiqlvqsgaevkkpgeslrisckgsgfniedyyihwvrqmp |
| Full-aa | | gkglewmgridpendetkygpifqghvtisadtsintvylqwsslkasdtamyycafrggvy |
| | | wgqgttvtvssggggsggggsggggsggggsdvvmtqsplslpvtlgqpasisckssqslld |
| | | sdgktylnwlqqrpgqsprrlislvskldsgvpdrfsgsgsgtdftlkisrveaedvgvyyc |
| | | wqgthfpgtfgggtkveiktttpaprpptpaptiasqplslrpeacrpaaggavhtrgldfa |
| | | cdiyiwaplagtcgvlllslvitlyckrgrkkllyifkqpfmrpvqttqeedgcscrfpeee |
| | | eggcelrvkfsrsadapaykqgqnqlynelnlgrreeydvldkrrgrdpemggkprrknpqe |
| | | glynelqkdkmaeayseigmkgerrrgkghdglyqglstatkdtydalhmqalppr |

CAR 4

| | | |
|---|---|---|
| CAR 4- | 1060 | atggccctccctgtcaccgccctgctgcttccgctggctcttctgctccacgccgctcggcc |
| Full-nt | | cgacgtcgtcatgacccaatcccctctctccctgccggtcaccctgggtcagccggcgtcga |
| | | tctcatgcaaaagctcacagtccctgctggattcggacggaaaaacctacttgaactggctc |
| | | caacagaggccgggtcagtcccctcgcagactgatctcgctggtgagcaagctcgactcggg |
| | | tgtgccggatcggttctccgggtcaggatcgggcaccgactttacgctcaagatttcgagag |
| | | tggaggccgaggatgtgggagtgtactattgctggcagggcacgcatttccccgggaccttt |
| | | ggaggcgggactaaggtggaaatcaagggaggtggcggatcaggcggaggaggcagcggcgg |
| | | aggtggatcaggaggcggagggtcagagatccagctggtccaaagcggagcagaggtgaaga |
| | | agccaggcgagtcccttcgcatttcgtgcaaagggagcggcttcaacattgaagattactac |
| | | atccactgggtgcggcaaatgccaggaaagggtctggaatggatgggacggatcgacccaga |
| | | aaatgatgaaactaagtacggaccgatcttccaaggacacgtcactatctccgcggacactt |
| | | cgatcaacaccgtgtacctccagtggagcagcttgaaagcctccgacaccgctatgtactac |
| | | tgtgccttccgcggaggagtctactggggacaggggactactgtgaccgtgtcgtccaccac |
| | | taccccagcaccgaggccacccaccccggctcctaccatcgcctcccagcctctgtccctgc |
| | | gtccggaggcatgtagacccgcagctggtggggccgtgcatacccggggtcttgacttcgcc |
| | | tgcgatatctacatttgggcccctctggctggtacttgcggggtcctgctgctttcactcgt |
| | | gatcactctttactgtaagcgcggtcggaagaagctgctgtacatctttaagcaacccttca |
| | | tgaggcctgtgcagactactcaagaggaggacggctgttcatgccggttcccagaggaggag |
| | | gaaggcggctgcgaactgcgcgtgaaattcagccgcagcgcagatgctccagcctacaagca |
| | | ggggcagaaccagctctacaacgaactcaatcttggtcggagagaggagtacgacgtgctgg |
| | | acaagcggagaggacgggacccagaaatgggcgggaagccgcgcagaaagaatccccaagag |
| | | ggcctgtacaacgagctccaaaaggataagatggcagaagcctatagcgagattggtatgaa |
| | | aggggaacgcagaagaggcaaaggccacgacggactgtaccagggactcagcaccgccacca |
| | | aggacacctatgacgctcttcacatgcaggccctgccgcctcgg |
| CAR 4- | 1061 | malpvtalllplalllhaarpdvvmtqsplslpvtlgqpasisckssqlldsdgktylnwlq |
| Full-aa | | qrpgqsprrlislvskldsgvpdrfsgsgsgtdftlkisrveaedvgvyycwqgthfpgtfg |
| | | ggtkveikggggsggggsggggsggggseiqlvqsgaevkkpgeslrisckgsgfniedyyi |
| | | hwvrqmpgkglewmgridpendetkygpifqghvtisadtsintvylqwsslkasdtamyyc |
| | | afrggvywgqgttvtvsstttpaprpptpaptiasqplslrpeacrpaaggavhtrgldfac |
| | | diyiwaplagtcgvlllslvitlyckrgrkkllyifkqpfmrpvqttqeedgcscrfpeeee |
| | | ggcelrvkfsrsadapaykqgqnglynelnlgrreeydvldkrrgrdpemggkprrknpqeg |
| | | lynelqkdkmaeayseigmkgerrrgkghdglyqglstatkdtydalhmqalppr |

CAR 5

| | | |
|---|---|---|
| CAR 5- | 1066 | atggccctccctgtcaccgccctgctgcttccgctggctcttctgctccacgccgctcggcc |
| Full-nt | | cgaaatccagctcgtgcagagcggagccgaggtcaagaaaccgggtgctaccgtgaagattt |
| | | catgcaagggatcgggcttcaacatcgaggattactacatccactgggtgcagcaggcacca |
| | | ggaaaaggacttgaatggatgggccggatcgacccggaaaatgacgagactaagtacggccc |
| | | tatcttccaaggacgggtgacgatcaccgcagacactagcaccaacaccgtctatatggaac |
| | | tctcgtccctgaggtccgaagatactgccgtgtactactgtgcgtttcgcggaggtgtgtac |
| | | tggggacagggtaccaccgtcaccgtgtcatcgggcggtggaggctccggtggaggagggtc |
| | | aggaggcggtggaagcggaggaggcggcagcgacgtggtcatgactcaatcgccgctgtcgc |
| | | tgcccgtcactctgggacaacccgcgtccatcagctgcaaatcctcgcagtcactgcttgac |
| | | tccgatggaaagacctacctcaactggctgcagcaacgcccaggccaatccccaagacgcct |
| | | gatctcgttggtgtcaaagctggactcaggggtgccggaccggttctccgggagcgggtcgg |
| | | gcacggatttcactctcaagatctccagagtggaagccgaggatgtgggagtctactactgc |
| | | tggcagggaacccatttccctggaacttttggcggaggaactaaggtcgagattaaaaccac |
| | | taccccagcaccgaggccacccaccccggctcctaccatcgcctcccagcctctgtccctgc |
| | | gtccggagacatgtagacccgcagctggtggggccgtgcatacccggggtcttgacttcgcc |
| | | tgcgatatctacatttgggcccctctggctggtacttgcggggtcctgctgctttcactcgt |
| | | gatcactctttactgtaagcgcggtcggaagaagctgctgtacatctttaagcaacccttca |
| | | tgaggcctgtgcagactactcaagaggaggacggctgttcatgccggttcccagaggaggag |
| | | gaaggcggctgcgaactgcgcgtgaaattcagccgcagcgcagatgctccagcctacaagca |
| | | ggggcagaaccagctctacaacgaactcaatcttggtcggagagaggagtacgacgtgctgg |
| | | acaagcggagaggacgggacccagaaatgggcgggaagccgcgcagaaagaatccccaagag |
| | | ggcctgtacaacgagctccaaaaggataagatggcagaagcctatagcgagattggtatgaa |
| | | aggggaacgcagaagaggcaaaggccacgacggactgtaccagggactcagcaccgccacca |
| | | aggacacctatgacgctcttcacatgcaggccctgccgcctcgg |
| CAR 5- | 1067 | malpvtallllpalllhaarpeiqlvqsgaevkkpgatvkisckgsgfniedyyihwvqqap |
| Full-aa | | gkglewmgridpendetkygpifqgrvtitadtstntvymelsslrsedtavyycafrggvy |
| | | wgqgttvtvssggggsggggsggggsggggsdvvmtqsplslpvtlgqpasisckssqslld |
| | | sdgktylnwlqqrpgqsprrlislvskldsgvpdrfsgsgsgtdftlkisrveaedvgvyyc |
| | | wqgthfpgtfgggtkveiktttpaprpptpaptiasqplslrpeacrpaaggavhtrgldfa |
| | | cdiyiwaplagtcgvlllslvitlyckrgrkkllyifkqpfmrpvqttqeedgcscrfpeee |
| | | eggcelrvkfsrsadapaykqgqnqlynelnlgrreeydvldkrrgrdpemggkprrknpqe |
| | | glynelqkdkmaeayseigmkgerrrgkghdglyqglstatkdtydalhmqalppr |

CAR 6

| | | |
|---|---|---|
| CAR6- | 1072 | atggccctccctgtcaccgccctgctgcttccgctggctcttctgctccacgccgctcggcc |
| Full-nt | | cgagattcagctcgtgcaatcgggagcggaagtcaagaagccaggagagtccttgcggatct |
| | | catgcaagggtagcggctttaacatcgaggattactacatccactgggtgaggcagatgccg |
| | | gggaagggactcgaatggatgggacggatcgacccagaaaacgacgaaactaagtacggtcc |
| | | gatcttccaaggccatgtgactattagcgccgatacttcaatcaataccgtgtatctgcaat |
| | | ggtcctcattgaaagcctcagataccgcgatgtactactgtgctttcagaggaggggtctac |
| | | tggggacagggaactaccgtgactgtctcgtccggcggaggcgggtcaggaggtggcggcag |
| | | cggaggaggagggtccggcggaggtgggtccgacgtcgtgatgacccagagccctgacagcc |
| | | tggcagtgagcctgggcgaaagagctaccattaactgcaaatcgtcgcagagcctgctggac |
| | | tcggacggaaaaacgtacctcaattggctgcagcaaaagcctggccagccaccgaagcgcct |
| | | tatctcactggtgtcgaagctggattcgggagtgcccgatcgcttctccggctcgggatcgg |
| | | gtactgacttcaccctcactatctcctcgcttcaagcagaggacgtggccgtctactactgc |
| | | tggcagggaacccactttccgggaaccttcggcggagggacgaaagtggagatcaagaccac |
| | | taccccagcaccgaggccacccaccccggctcctaccatcgcctcccagcctctgtccctgc |
| | | gtccggaggcatgtagacccgcagctggtggggccgtgcatacccggggtcttgacttcgcc |
| | | tgcgatatctacatttgggcccctctggctggtacttgcggggtcctgctgctttcactcgt |
| | | gatcactctttactgtaagcgcggtcggaagaagctgctgtacatctttaagcaacccttca |
| | | tgaggcctgtgcagactactcaagaggaggacggctgttcatgccggttcccagaggaggag |
| | | gaaggcggctgcgaactgcgcgtgaaattcagccgcagcgcagatgctccagcctacaagca |
| | | ggggcagaaccagctctacaacgaactcaatcttggtcggagagaggagtacgacgtgctgg |
| | | acaagcggagaggacgggacccagaaatgggcgggaagccgcgcagaaagaatccccaagag |
| | | ggcctgtacaacgagctccaaaaggataagatggcagaagcctatagcgagattggtatgaa |
| | | aggggaacgcagaagaggcaaaggccacgacggactgtaccagggactcagcaccgccacca |
| | | aggacacctatgacgctcttcacatgcaggccctgccgcctcgg |
| CAR6- | 1073 | malpvtalllplalllhaarpeiqlvqsgaevkkpgeslrisckgsgfniedyyihwvrqmp |
| Full-aa | | gkglewmgridpendetkygpifqghvtisadtsintvylqwsslkasdtamyycafrggvy |
| | | wgqgttvtvssggggsggggsggggsggggsdvvmtqspdslavslgeratinckssqslld |
| | | sdgktylnwlqqkpgqppkrlislvskldsgvpdrfsgsgsgtdftltisslqaedvavyyc |
| | | wqgthfpgtfgggtkveiktttpaprpptpaptiasqplslrpeacrpaaggavhtrgldfa |
| | | cdiyiwaplagtcgvlllslvitlyckrgrkkllyifkqpfmrpvqttqeedgcscrfpeee |
| | | eggcelrvkfsrsadapaykqgqnqlynelnlgrreeydvldkrrgrdpemggkprrknpqe |
| | | glynelqkdkmaeayseigmkgerrrgkghdglyqglstatkdtydalhmqalppr |

CAR 7

| | | |
|---|---|---|
| CAR 7 | 1078 | atggccctccctgtcaccgccctgctgcttccgctggctcttctgctccacgccgctcggcc |
| Full-nt | | cgacgtggtgatgactcagtcgcctgactcgctggctgtgtcccttggagagcgggccacta |
| | | tcaattgcaagtcatcccagtcgctgctggattccgacgggaaaacctacctcaattggctg |
| | | cagcaaaaaccgggacagcctccaaagcggctcatcagcctggtgtccaagttggacagcgg |
| | | cgtgccagaccgcttctccggttcgggaagcggtactgatttcacgctgaccatctcatccc |
| | | tccaagcggaggatgtggcagtctactactgttggcagggcacgcattttccgggcactttt |
| | | ggaggagggaccaaggtcgaaatcaagggaggaggtggctcgggcggaggaggctcgggagg |
| | | aggaggatcaggaggcggtggaagcgagattcaactggtccagagcggcgcagaagtcaaga |
| | | agccgggtgaatcgctcagaatctcgtgcaaaggatcgggattcaacatcgaggactactac |
| | | attcactgggtcagacaaatgccgggcaaagggctggaatggatggggaggatcgaccccga |
| | | aaacgatgaaaccaagtacggaccaatcttccaagggcacgtgaccatttcggcggacacct |
| | | caatcaacactgtgtacctccagtggagctcacttaaggccagcgataccgccatgtactat |
| | | tgcgctttccgcggaggggtgtactggggacagggcactactgtgaccgtgtcatccaccac |
| | | taccccagcaccgaggccacccaccccggctcctaccatcgcctcccagcctctgtccctgc |
| | | gtccggaggcatgtagacccgcagctggtggggccgtgcatacccggggtcttgacttcgcc |
| | | tgcgatatctacatttgggcccctctggctggtacttgcggggtcctgctgctttcactcgt |
| | | gatcactctttactgtaagcgcggtcggaagaagctgctgtacatctttaagcaacccttca |
| | | tgaggcctgtgcagactactcaagaggaggacggctgttcatgccggttcccagaggaggag |
| | | gaaggcggctgcgaactgcgcgtgaaattcagccgcagcgcagatgctccagcctacaagca |
| | | ggggcagaaccagctctacaacgaactcaatcttggtcggagagaggagtacgacgtgctgg |
| | | acaagcggagaggacgggacccagaaatgggcgggaagccgcgcagaaagaatccccaagag |
| | | agggcctgtacaacgagctccaaaaggataagatggcagaagcctatagcgagattggtatg |
| | | aaaggggaacgcagaagaggcaaaggccacgacggactgtaccagggactcagcaccgccac |
| | | caaggacacctatgacgctcttcacatgcaggccctgccgcctcgg |
| CAR 7 | 1079 | malpvtalllplalllhaarpdvvmtqspdslavslgeratinckssqslldsdgktylnwl |
| Full-aa | | qqkpgqppkrlislvskldsgvpdrfsgsgsgtdftltisslqaedvavyycwqgthfpgtf |
| | | gggtkveikggggsggggsggggsggggseiqlvqsgaevkkpgeslrisckgsgfniedyy |
| | | ihwvrqmpgkglewmgridpendetkygpifqghvtisadtsintvylqwsslkasdtamyy |
| | | cafrggvywgqgttvtvsstttpaprpptpaptiasqplslrpeacrpaaggavhtrgldfa |
| | | cdiyiwaplagtcgvlllslvitlyckrgrkkllyifkqpfmrpvqttqeedgcscrfpeee |
| | | eggcelrvkfsrsadapaykqgqnqlynelnlgrreeydvldkrrgrdpemggkprrknpqe |
| | | glynelqkdkmaeayseigmkgerrrgkghdglyqglstatkdtydalhmqalppr |
| CAR 8- | 1084 | atggccctccctgtcaccgccctgctgcttccgctggctcttctgctccacgccgctcggcc |
| Full-nt | | cgatgtggtcatgacgcagtcaccactgtccctccccgtgacccttggacagccagcgtcga |
| | | ttagctgcaagtcatcccaatcccgctcgattcggatggaaagacctatctcaactggctgc |
| | | agcaaagacccggtcagagccctaggagactcatctcgttggtgtcaaagctggacagcgga |
| | | gtgccggaccggttttccggttcgggatcggggacggacttcactctgaagatttcacgggt |
| | | ggaagctgaggatgtgggagtgtactactgctggcagggaacccatttccctggcacttttg |
| | | gcggaggaactaaggtcgaaatcaagggaggaggtggctcgggaggaggcggatcgggcgga |
| | | ggcgggagcggcggaggagggtccgaaatccaacttgtccagtcaggagccgaagtgaagaa |
| | | accgggagccaccgtcaaaatcagctgtaagggatcgggattcaatatcgaggactactaca |
| | | tccactgggtgcagcaagctccgggcaaaggactggagtggatggggcgcatcgacccagag |
| | | aacgacgaaaccaaatacggcccgatcttccaagggcgggtgaccatcaccgcggacacctc |
| | | aactaacactgtgtacatggagctgagctccctgcgctccgaagatactgcagtctactact |
| | | gcgccttccgcggtggtgtgtactggggacagggcaccactgtgactgtcagctcgaccact |
| | | accccagcaccgaggccacccaccccggctcctaccatcgcctcccagcctctgtccctgcg |
| | | tccggaggcatgtagacccgcagctggtggggccgtgcatacccggggtcttgacttcgcct |
| | | gcgatatctacatttgggcccctctggctggtacttgcggggtcctgctgctttcactcgtg |
| | | atcactctttactgtaagcgcggtcggaagaagctgctgtacatctttaagcaagcccttca |
| | | tgaggcctgtgcagactactcaagaggaggacggctgttcatgccggttcccagaggaggag |
| | | gaaggcggctgcgaactgcgcgtgaaattcagccgcagcgcagatgctccagcctacaagca |
| | | ggggcagaaccagctctacaacgaactcaatcttggtcggagagaggagtacgacgtgctgg |
| | | acaagcggagaggacgggacccagaaatgggcgggaagccgcgcagaaagaatccccaagag |
| | | ggcctgtacaacgagctccaaaaggataagatggcagaagcctatagcgagattggtatgaa |
| | | aggggaacgcagaagaggcaaaggccacgacggactgtaccagggactcagcaccgccacca |
| | | aggacacctatgacgctcttcacatgcaggccctgccgcctcgg |
| CAR 8- | 1085 | malpvtalllplalllhaarpdvvmtqsplslpvtlgqpasisckssqslldsdgktylnwl |
| Full-aa | | qqrpgqsprrlislvskldsgvpdrfsgsgsgtdftlkisrveaedvgvyycwqgthfpgtf |
| | | gggtkveikggggsggggsggggsggggseiqlvqsgaevkkpgatvkisckgsgfniedyy |
| | | ihwvqqapgkglewmgridpendetkygpifqgrvtitadtstntvymelsslrsedtavyy |
| | | cafrggvywgqgttvtvsstttpaprpptpaptiasqplslrpeacrpaaggavhtrgldfa |
| | | cdiyiwaplagtcgvlllslvitlyckrgrkkllyifkqpfmrpvqttqeedgcscrfpeee |
| | | eggcelrvkfsrsadapaykqgqnqlynelnlgrreeydvldkrrgrdpemggkprrknpqe |
| | | glynelqkdkmaeayseigmkgerrrgkghdglyqglstatkdtydalhmqalppr |

CAR 9 Mouse anti-EGFRvIII clone 3C10

| | | |
|---|---|---|
| CAR 9- | 1089 | atggccctccctgtcaccgccctgctgcttccgctggctcttctgctccacgccgctcggcc |
| Full-nt | | cgagatccagctccaacagagcggagccgaactggtcaaaccgggagcgtcggtgaagttgt |
| | | catgcactggatcgggcttcaacatcgaggattactacatccactgggtcaagcaacgcacc |
| | | gagcaggggctggaatggatcggacggatcgaccccgaaaacgatgaaaccaagtacgggcc |
| | | tatcttccaaggacgggccaccattacggctgacacgtcaagcaataccgtctacctccagc |
| | | tttccagcctgacctccgaggacactgccgtgtactactgcgccttcagaggaggcgtgtac |
| | | tggggaccaggaaccactttgaccgtgtccagcggaggcggtggatcaggaggaggaggctc |
| | | aggcggtggcggctcgcacatggacgtggtcatgactcagtccccgctgaccctgtcggtgg |
| | | caattggacagagcgcatccatctcgtgcaagagctcacagtcgctgctggattccgacgga |
| | | aagacttatctgaactggctgctccaaagaccagggcaatcaccgaaacgccttatctccct |
| | | ggtgtcgaaactcgactcgggtgtgccggatcggtttaccggtagcgggtccggcacggact |
| | | tcactctccgcatttcgagggtggaagcggaggatctcgggatctactactgttggcaggga |
| | | acccacttccctgggacttttggaggcggaactaagctggaaatcaagaccactaccccagc |
| | | accgaggccacccaccccggctcctaccatcgcctcccagcctctgtccctgcgtccggagg |
| | | catgtagacccgcagctggtggggccgtgcatacccggggtcttgacttcgcctgcgatatc |
| | | tacatttgggcccctctggctggtacttgcggggtcctgctgctttcactcgtgatcactct |
| | | ttactgtaagcgcggtcggaagaagctgctgtacatctttaagcaacccttcatgaggcctg |
| | | tgcagactactcaagaggaggacggctgttcatgccggttcccagaggaggaggaaggcggc |
| | | tgcgaactgcgcgtgaaattcagccgcagcgcagatgctccagcctacaagcaggggcagaa |
| | | ccagctctacaacgaactcaatcttggtcggagagaggagtacgacgtgctggacaagcgga |
| | | gaggacgggacccagaaatgggcgggaagccgcgcagaaagaatccccaagagggcctgtac |
| | | aacgagctccaaaaggataagatggcagaagcctatagcgagattggtatgaaaggggaacg |
| | | cagaagaggcaaaggccacgacggactgtaccagggactcagcaccgccaccaaggacacct |
| | | atgacgctcttcacatgcaggccctgccgcctcgg |
| CAR 9- | 1090 | malpvtalllplalllhaarpeiqlqqsgaelvkpgasvklsctgsgfniedyyihwvkqrt |
| Full-aa | | eqglewigridpendetkygpifqgratitadtssntvylqlssltsedtavyycafrggvy |
| | | wgpgttltvssggggsggggsggggshmdvvmtqspltlsvaigqsasisckssqslldsdg |
| | | ktylnwllqrpgqspkrlislvskldsgvpdrftgsgsgtdftlrisrveaedlgiyycwqg |
| | | thfpgtfgggtkleiktttpaprpptpaptiasqplslrpeacrpaaggavhtrgldfacdi |
| | | yiwaplagtcgvlllslvitlyckrgrkkllyifkqpfmrpvqttqeedgcscrfpeeeegg |
| | | celrvkfsrsadapaykqgqnqlynelnlgrreeydvldkrrgrdpemggkprrknpqegly |
| | | nelqkdkmaeayseigmkgerrrgkghdglyqglstatkdtydalhmqalppr |

CAR10 Anti-EGFRvIII clone 139

| | | |
|---|---|---|
| CAR 10 | 1095 | atggccctccctgtcaccgccctgctgcttccgctggctcttctgctccacgccgctcggcc |
| Full-nt | | cgatatccaaatgactcagagcccttcatccctgagcgccagcgtcggagacagggtgacca |
| | | tcacgtgccgggcatcccaaggcattagaaataacttggcgtggtatcagcaaaaaccagga |
| | | aaggccccgaagcgcctgatctacgcggcctccaaccttcagtcaggagtgccctcgcgctt |
| | | caccgggagcggtagcggaactgagtttacccttatcgtgtcgtccctgcagccagaggact |
| | | tcgcgacctactactgcctccagcatcactcgtacccgttgacttcgggaggcggaaccaag |
| | | gtcgaaatcaaacgcactggctcgacgtcagggtccggtaaaccgggatcgggagaaggatc |
| | | ggaagtccaagtgctggagagcggaggcggactcgtgcaacctggcgggtcgctgcggctca |
| | | gctgtgccgcgtcgggttttactttcagctcgtacgctatgtcatgggtgcggcaggctccg |
| | | ggaaaggggctggaatgggtgtccgctatttccggctcgggtggaagcaccaattacgccga |
| | | ctccgtgaagggacgcttcaccatctcacgggataactccaagaatactctgtacctccaga |
| | | tgaactcgctgagagccgaggacaccgcagtgtactactgcgcagggtcaagcggctggtcc |
| | | gaatactggggacagggcaccctcgtcactgtcagctccaccactaccccagcaccgaggcc |
| | | acccaccccggctcctaccatcgcctcccagcctctgtccctgcgtccggaggcatgtagac |
| | | ccgcagctggtggggccgtgcatacccggggtcttgacttcgcctgcgatatctacatttgg |
| | | gcccctctggctggtacttgcggggtcctgctgctttcactcgtgatcactctttactgtaa |
| | | gcgcggtcggaagaagctgctgtacatctttaagcaacccttcatgaggcctgtgcagacta |
| | | ctcaagaggaggacggctgttcatgccggttcccagaggaggaggaaggcggctgcgaactg |
| | | cgcgtgaaattcagccgcagcgcagatgctccagcctacaagcaggggcagaaccagctcta |
| | | caacgaactcaatcttggtcggagagaggagtacgacgtgctggacaagcggagaggacggg |
| | | acccagaaatgggcgggaagccgcgcagaaagaatccccaagagggcctgtacaacgagctc |
| | | caaaaggataagatggcagaagcctatagcgagattggtatgaaaggggaacgcagaagagg |
| | | caaaggccacgacggactgtaccagggactcagcaccgccaccaaggacacctatgacgctc |
| | | ttcacatgcaggccctgccgcctcgg |
| CAR 10 | 1096 | malpvtalllplalllhaarpdiqmtqspsslsasvgdrvtitcrasqgirnnlawyqqkpg |
| Full-aa | | kapkrliyaasnlqsgvpsrftgsgsgteftlivsslqpedfatyyclqhhsypltsgggtk |
| | | veikrtgstsgsgkpgsgegsevqvlesggglvqpggslrlscaasgftfssyamswvrqap |
| | | gkglewvsaisgsggstnyadsvkgrftisrdnskntlylqmnslraedtavyycagssgws |
| | | eywgqgtlvtvsstttpaprpptpaptiasqplslrpeacrpaaggavhtrgldfacdiyiw |
| | | aplagtcgvlllslvitlyckrgrkkllyifkqpfmrpvqttqeedgcscrfpeeeeggcel |
| | | rvkfsrsadapaykqgqnqlynellgrreeydvldkrrgrdpemggkprrknpqeglynelq |
| | | kdkmaeayseigmkgerrrgkghdglyqglstatkdtydalhmqalppr |

[0460] In one embodiment, the cell of the invention (e.g., a cell comprising both a TA CAR and a BCA CAR) comprises a TA CAR molecule that binds EGFRvIII that comprises (e.g., consists of) an amino acid sequence as provided in Table 17. In one embodiment, the TA CAR that binds EGFRvIII comprises (e.g., consists of) an amino acid sequence of SEQ ID NO: 1043, SEQ ID NO: 1049, SEQ ID NO: 1055, SEQ ID NO: 1061, SEQ ID NO: 1067, SEQ ID NO: 1073, SEQ ID NO: 1079, SEQ ID NO: 1085, SEQ ID NO: 1090, or SEQ ID NO: 1096; or an amino acid sequence having at least one, two, three, four, five, 10, 15, 20 or 30 modifications (e.g., substitutions, e.g., conservative substitutions) but not more than 60, 50, or 40 modifications (e.g., substitutions, e.g., conservative substitutions) of an amino acid sequence of SEQ ID NO: 1043, SEQ ID NO: 1049, SEQ ID NO: 1055, SEQ ID NO: 1061, SEQ ID NO: 1067, SEQ ID NO: 1073, SEQ ID NO: 1079, SEQ ID NO: 1085, SEQ ID NO: 1090, or SEQ ID NO: 1096; or an amino acid sequence having 85%, 90%, 95%, 96%, 97%, 98%, 99°/identity to an amino acid sequence of SEQ ID NO: 1043, SEQ ID NO: 1049, SEQ ID NO: 1055, SEQ ID NO: 1061, SEQ ID NO: 1067, SEQ ID NO: 1073, SEQ ID NO: 1079, SEQ ID NO: 1085, SEQ ID NO: 1090, or SEQ ID NO: 1096.

[0461] In one aspect, the cell of the invention (e.g., a cell comprising both a TA CAR and a BCA CAR) comprises a TA CAR molecule comprising an antigen binding domain that binds to a tumor antigen. In one embodiment, the TA CAR comprises a CAR molecule comprising a CD123 antigen binding domain (e.g., a murine, human or humanized antibody or antibody fragment that specifically binds to mesothelin), a transmembrane domain, and an intracellular signaling domain (e.g., an intracellular signaling domain comprising a costimulatory domain and/or a primary signaling domain).

[0462] Exemplary TA CAR molecules that target CD123 are described herein, and are provided in Tables 2, 6 and 9 of WO2016/028896. Other exemplary TA CAR molecules that target CD123 are described in WO/2014/130635 (e.g., Table 1 of WO/2014/130635). Other exemplary TA CAR molecules that target CD123 are described in WO/2014/144622.

[0463] In one aspect, the cell of the invention (e.g., a cell comprising both a TA CAR and a BCA CAR) comprises a TA CAR molecule comprising an antigen binding domain that binds to a tumor antigen. In one embodiment, the TA CAR comprises a CAR molecule comprising a CD33 antigen binding domain (e.g., a murine, human or humanized antibody or antibody fragment that specifically binds to mesothelin), a transmembrane domain, and an intracellular signaling domain (e.g., an intracellular signaling domain comprising a costimulatory domain and/or a primary signaling domain). Exemplary TA CAR molecules that target CD33 are described herein, and are provided in WO2016/014576, e.g., in Table 2 of WO2016/014576.

[0464] In one aspect, the cell of the invention (e.g., a cell comprising both a TA CAR and a BCA CAR) comprises a TA CAR molecule comprising an antigen binding domain that binds to a tumor antigen. In one embodiment, the TA CAR comprises a CAR molecule comprising a CLL-1 antigen binding domain (e.g., a murine, human or humanized antibody or antibody fragment that specifically binds to mesothelin), a transmembrane domain, and an intracellular signaling domain (e.g., an intracellular signaling domain comprising a costimulatory domain and/or a primary signaling domain). Exemplary TA CAR molecules that target CLL-1 are described herein, and are provided in WO/2016/014535, e.g., in Table 2 of WO2016/014535.

### Natural Killer Cell Receptor (NKR) CARs

[0465] In an embodiment, the CAR molecule described herein, e.g., the CAR molecule that targets a tumor antigen (TA CAR) or the CAR molecule that targets a B cell antigen (BCA CAR), comprises one or more components of a natural killer cell receptor (NKR), thereby forming an NKR-CAR. The NKR component can be a transmembrane domain, a hinge domain, or a cytoplasmic domain from any of the following natural killer cell receptors: killer cell immunoglobulin-like receptor (KIR), e.g., KIR2DL1, KIR2DL2/L3, KIR2DL4, KIR2DL5A, KIR2DL5B, KIR2DS1, KIR2DS2, KIR2DS3, KIR2DS4, DIR2DS5, KIR3DL1/S1, KIR3DL2, KIR3DL3, KIR2DP1, and KIR3DP1; natural cytotoxicity receptor (NCR), e.g., NKp30, NKp44, NKp46; signaling lymphocyte activation molecule (SLAM) family of immune cell receptors, e.g., CD48, CD229, 2B4, CD84, NTB-A, CRACC, BLAME, and CD2F-10; Fc receptor (FcR), e.g., CD16, and CD64; and Ly49 receptors, e.g., LY49A, LY49C. The NKR-CAR molecules described herein may interact with an adaptor molecule or intracellular signaling domain, e.g., DAP12. Exemplary configurations and sequences of CAR molecules comprising NKR components are described in International Publication No. WO2014/145252, the contents of which are hereby incorporated by reference.

### Split CAR

[0466] In some embodiments, the CAR-expressing cell, e.g., the cell expressing a BCA CAR and a TA CAR, described herein, uses a split CAR The split CAR approach is described in more detail in publications WO2014/055442 and WO2014/055657, incorporated herein by reference. Briefly, a split CAR system comprises a cell expressing a first CAR having a first antigen binding domain and a costimulatory domain (e.g., 41BB), and the cell also expresses a second CAR having a second antigen binding domain and an intracellular signaling domain (e.g., CD3 zeta). When the cell encounters the first antigen, the costimulatory domain is activated, and the cell proliferates. When the cell encounters the second antigen, the intracellular signaling domain is activated and cell-killing activity begins. Thus, the CAR-expressing cell is only fully activated in the presence of both antigens. In embodiments the first antigen binding domain recognizes the tumor antigen or B cell antigen described herein, e.g., comprises an antigen binding domain described herein, and the second antigen binding domain recognizes a second antigen, e.g., a second tumor antigen or a second B cell antigen described herein.

### Strategies for Regulating Chimeric Antigen Receptors

[0467] There are many ways CAR activities can be regulated. In some embodiments, a regulatable CAR (RCAR) where the CAR activity can be controlled is desirable to optimize the safety and efficacy of a CAR therapy. For example, inducing apoptosis using, e.g., a caspase fused to a dimerization domain (see, e.g., Di et al., N Engl. J. Med. 2011 Nov. 3; 365(18):1673-1683), can be used as a safety switch in the CAR therapy of the instant invention. In another example, CAR-expressing cells can also express an inducible Caspase-9 (iCaspase-9) molecule that, upon administration of a dimerizer drug (e.g., rimiducid (also called AP1903 (Bellicum Pharmaceuticals) or AP20187 (Ariad)) leads to activation of the Caspase-9 and apoptosis of the cells. The iCaspase-9 molecule contains a chemical inducer of dimerization (CID) binding domain that mediates dimerization in the presence of a CID. This results in inducible and selective depletion of CAR-expressing cells. In some cases, the iCaspase-9 molecule is encoded by a nucleic acid molecule separate from the CAR-encoding vector(s). In some cases, the iCaspase-9 molecule is encoded by the same nucleic acid molecule as the CAR-encoding vector. The iCaspase-9 can provide a safety switch to avoid any toxicity of CAR-expressing cells. See, e.g., Song et al. Cancer Gene Ther. 2008; 15(10):667-75; Clinical Trial Id. No. NCT02107963; and Di Stasi et al. N. Engl. J. Med. 2011; 365:1673-83.

[0468] Alternative strategies for regulating the CAR therapy of the instant invention include utilizing small molecules or antibodies that deactivate or turn off CAR activity, e.g., by deleting CAR-expressing cells, e.g., by inducing antibody dependent cell-mediated cytotoxicity (ADCC). For example, CAR-expressing cells described herein may also express an antigen that is recognized by molecules capable of inducing cell death, e.g., ADCC or complement-induced cell death. For example, CAR expressing cells described herein may also express a receptor capable of being targeted by an antibody or antibody fragment. Examples of such receptors include EpCAM, VEGFR, integrins (e.g., integrins αvβ3, α4, αI3/4β3, α4β7, α5β1, αvβ3, αv), members of the TNF receptor superfamily (e.g., TRAIL-R1, TRAIL-R2), PDGF Receptor, interferon receptor, folate receptor, GPNMB, ICAM-1, HLA-DR, CEA, CA-125, MUC1, TAG-72, IL-6 receptor, 5T4, GD2, GD3, CD2, CD3, CD4, CD5, CD1 1, CD1 1a/LFA-1, CD15, CD18/ITGB2, CD19, CD20, CD22, CD23/IgE Receptor, CD25, CD28, CD30, CD33, CD38, CD40, CD41, CD44, CD51, CD52, CD62L, CD74, CD80, CD125, CD147/basigin, CD152/CTLA-4, CD154/CD40L, CD195/CCR5, CD319/SLAMF7, and EGFR, and truncated versions thereof (e.g., versions preserving one or more extracellular epitopes but lacking one or more regions within the cytoplasmic domain).

[0469] For example, a CAR-expressing cell described herein may also express a truncated epidermal growth factor receptor (EGFR) which lacks signaling capacity but retains the epitope that is recognized by molecules capable of inducing ADCC, e.g., cetuximab (ERBITUX®), such that administration of cetuximab induces ADCC and subsequent depletion of the CAR-expressing cells (see, e.g., WO2011/056894, and Jonnalagadda et al., Gene Ther. 2013; 20(8)853-860). Another strategy includes expressing a highly compact marker/suicide gene that combines target epitopes from both CD32 and CD20 antigens in the CAR-expressing cells described herein, which binds rituximab, resulting in selective depletion of the CAR-expressing cells, e.g., by ADCC (see, e.g., Philip et al., Blood. 2014; 124(8)1277-1287). Other methods for depleting CAR-expressing cells described herein include administration of CAMPATH, a monoclonal anti-CD52 antibody that selectively binds and targets mature lymphocytes, e.g., CAR-expressing cells, for destruction, e.g., by inducing ADCC. In other embodiments, the CAR-expressing cell can be selectively targeted using a CAR ligand, e.g., an anti-idiotypic antibody. In some embodiments, the anti-idiotypic antibody can cause effector cell activity, e.g, ADCC or ADC activities, thereby reducing the number of CAR-expressing cells. In other embodiments, the CAR ligand, e.g., the anti-idiotypic antibody, can be coupled to an agent that induces cell killing, e.g., a toxin, thereby reducing the number of CAR-expressing cells. Alternatively, the CAR molecules themselves can be configured such that the activity can be regulated, e.g., turned on and off, as described below.

[0470] In other embodiments, a CAR-expressing cell described herein may also express a target protein recognized by the T cell depleting agent. In one embodiment, the target protein is CD20 and the T cell depleting agent is an anti-CD20 antibody, e.g., rituximab. In such embodiment, the T cell depleting agent is administered once it is desirable to reduce or eliminate the CAR-expressing cell, e.g., to mitigate the CAR induced toxicity. In other embodiments, the T cell depleting agent is an anti-CD52 antibody, e.g., alemtuzumab.

[0471] In other embodiments, a RCAR comprises a set of polypeptides, typically two in the simplest embodiments, in which the components of a standard CAR described herein, e.g., an antigen binding domain and an intracellular signaling domain, are partitioned on separate polypeptides or members. In some embodiments, the set of polypeptides include a dimerization switch that, upon the presence of a dimerization molecule, can couple the polypeptides to one another, e.g., can couple an antigen binding domain to an intracellular signaling domain. Additional description and exemplary configurations of such regulatable CARs are provided herein and in International Publication No. WO 2015/090229, hereby incorporated by reference in its entirety.

Co-Expression of CAR with a Chemokine Receptor

[0472] In embodiments, the CAR-expressing cell (e.g., the cell expressing both a TA CAR and a BCA CAR) described herein further comprises a chemokine receptor molecule. Transgenic expression of chemokine receptors CCR2b or CXCR2 in T cells enhances trafficking to CCL2- or CXCL1-secreting solid tumors including melanoma and neuroblastoma (Craddock et al., J Immunother. 2010 October; 33(8):780-8 and Kershaw et al., Hum Gene Ther. 2002 Nov. 1; 13(16):1971-80). Thus, without wishing to be bound by theory, it is believed that chemokine receptors expressed in CAR-expressing cells (e.g., the cell expressing both a TA CAR and a BCA CAR) that recognize chemokines secreted by tumors, e.g., solid tumors, can improve homing of the CAR-expressing cell (e.g., the cell expressing both a TA CAR and a BCA CAR) to the tumor, facilitate the infiltration of the CAR-expressing cell to the tumor, and enhances antitumor efficacy of the CAR-expressing cell (e.g., the cell expressing both a TA CAR and a BCA CAR). The chemokine receptor molecule can comprise a naturally occurring or recombinant chemokine receptor or a chemokine-binding fragment thereof. A chemokine receptor molecule suitable for expression in a CAR-expressing cell (e.g., the cell expressing both a TA CAR and a BCA CAR) described herein include a CXC chemokine receptor (e.g., CXCR1, CXCR2, CXCR3, CXCR4, CXCR5, CXCR6, or CXCR7), a CC chemokine receptor (e.g., CCR1, CCR2, CCR3, CCR4, CCR5, CCR6, CCR7, CCR8, CCR9, CCR10, or CCR11), a CX3C chemokine receptor (e.g., CX3CR1), a XC chemokine receptor (e.g., XCR1), or a chemokine-binding fragment thereof. In one embodiment, the chemokine receptor molecule to be expressed with a CAR described herein is selected based on the chemokine(s) secreted by the tumor. In one embodiment, the CAR-expressing cell (e.g., the cell expressing both a TA CAR and a BCA CAR) described herein further comprises, e.g., expresses, a CCR2b receptor or a CXCR2 receptor. In an embodiment, the CAR described herein (e.g., the cell expressing both a TA CAR and a BCA CAR) and the chemokine receptor molecule are on the same vector or are on two different vectors. In embodiments where the CAR described herein and the chemokine receptor molecule are on the same vector, the CAR e.g., the cell expressing both a TA CAR and a BCA CAR) and the chemokine receptor molecule are each under control of two different promoters or are under the control of the same promoter.

### Nucleic Acid Constructs Encoding a CAR

[0473] The present disclosure also provides nucleic acid molecules encoding one or more of the CAR constructs targeting a tumor antigen and/or a B cell antigen described herein. In one aspect, the nucleic acid molecule is provided as a messenger RNA transcript. In one aspect, the nucleic acid molecule is provided as a DNA construct.

[0474] Accordingly, in one aspect, the invention pertains to a nucleic acid molecule encoding a chimeric antigen receptor (CAR), wherein the CAR comprises an antigen binding domain that binds to a tumor antigen described herein or a B cell antigen described herein, a transmembrane domain (e.g., a transmembrane domain described herein), and an intracellular signaling domain (e.g., an intracellular signaling domain described herein) comprising a stimulatory domain, e.g., a costimulatory signaling domain (e.g., a costimulatory signaling domain described herein) and/or a primary signaling domain (e.g., a primary signaling domain described herein, e.g., a zeta chain described herein). In one embodiment, the transmembrane domain is transmembrane domain of a protein selected from the group consisting of the alpha, beta or zeta chain of the T-cell receptor, CD28, CD3 epsilon, CD45, CD4, CD5, CD8, CD9, CD16, CD22, CD33, CD37, CD64, CD80, CD86, CD134, CD137 and CD154. In some embodiments, a transmembrane domain may include at least the transmembrane region(s) of, e.g., KIRDS2, OX40, CD2, CD27, LFA-1 (CD11a, CD18), ICOS (CD278), 4-1BB (CD137), GITR, CD40, BAFFR. HVEM (LIGHTR), SLAMF7, NKp80 (KLRF1), NKp44, NKp30, NKp46, CD160, CD19, 1L2R beta, IL2R gamma, IL7R α, ITGA1, VLA1, CD49a, ITGA4, IA4, CD49D, ITGA6, VLA-6, CD49f, ITGAD, CD11d, ITGAE, CD103, ITGAL, CD11a, LFA-1, ITGAM, CD11b, ITGAX, CD11c, ITGB1, CD29, ITGB2, CD18, LFA-1, ITGB7, NKG2D, NKG2C, TNFR2, DNAM1 (CD226), SLAMF4 (CD244, 2B4), CD84, CD96 (Tactile), CEACAM1, CRTAM, Ly9 (CD229), CD160 (BY55), PSGL1, CD100 (SEMA4D), SLAMF6 (NTB-A, Ly108), SLAM (SLAMF1, CD150, IPO-3), BLAME (SLAMF8), SELPLG (CD162), LTBR, PAG/Cbp, NKG2D, and NKG2C.

[0475] In one embodiment, the transmembrane domain comprises a sequence of SEQ ID NO: 12, or a sequence with 95-99% identity thereof. In one embodiment, the antigen binding domain is connected to the transmembrane domain by a hinge region, e.g., a hinge described herein. In one embodiment, the hinge region comprises SEQ ID NO:4 or SEQ ID NO:6 or SEQ ID NO:8 or SEQ ID NO: 10, or a sequence with 95-99% identity thereof. In one embodiment, the isolated nucleic acid molecule further comprises a sequence encoding a costimulatory domain. In one embodiment, the costimulatory domain is a functional signaling domain of a protein selected from the group consisting of OX40, CD27, CD28, CDS, ICAM-1, LFA-1 (CD11a/CD18), ICOS (CD278), and 4-1BB (CD137). Further examples of such costimulatory molecules include CDS, ICAM-1, GITR, BAFFR, HVEM (LIGHTR), SLAMF7, NKp80 (KLRF1), NKp44, NKp30, NKp46, CD160, CD19, CD4, CD8alpha, CD8beta, IL2R beta, IL2R gamma, IL7R alpha, ITGA4, VLA1, CD49a, ITGA4, IA4, CD49D, ITGA6, VLA-6, CD49f, ITGAD, CD11d, ITGAE, CD103, ITGAL, CD11a, LFA-1, ITGAM, CD11b, ITGAX, CD11c, ITGB1, CD29, ITGB2, CD18, LFA-1, ITGB7, NKG2D, NKG2C, TNFR2, TRANCE/RANKL, DNAM1 (CD226), SLAMF4 (CD244, 2B4), CD84, CD96 (Tactile), CEACAM1, CRTAM, Ly9 (CD229), CD160 (BY55), PSGL1, CD100 (SEMA4D), CD69, SLAMF6 (NTB-A, Ly108), SLAM (SLAMF1, CD150, IPO-3), BLAME (SLAMF8), SELPLG (CD162), LTBR, LAT, GADS, SLP-76, PAG/Cbp, NKG2D, and NKG2C. In one embodiment, the costimulatory domain comprises a sequence of SEQ ID NO: 16, or a sequence with 95-99% identity thereof. In one embodiment, the intracellular signaling domain comprises a functional signaling domain of 4-1BB and a functional signaling domain of CD3 zeta. In one embodiment, the intracellular signaling domain comprises the sequence of SEQ ID NO: 14 or SEQ ID NO: 16, 42, or 44, or a sequence with 95-99% identity thereof, and the sequence of SEQ ID NO: 18 or SEQ ID NO:20, or a sequence with 95-99% identity thereof, wherein the sequences comprising the intracellular signaling domain are expressed in the same frame and as a single polypeptide chain.

[0476] In another aspect, the invention pertains to an isolated nucleic acid molecule encoding a CAR construct comprising a leader sequence of SEQ ID NO: 2, a scFv domain as described herein, a hinge region of SEQ ID NO:4 or SEQ ID NO:6 or SEQ ID NO:8 or SEQ ID NO:10 (or a sequence with 95-99% identity thereof), a transmembrane domain having a sequence of SEQ ID NO: 12 (or a sequence with 95-99% identity thereof), a 4-1BB costimulatory domain having a sequence of SEQ ID NO: 14, a CD27 costimulatory domain having a sequence of SEQ ID NO: 16 (or a sequence with 95-99% identity thereof), a ICOS costimulatory domain having a sequence of SEQ ID NO: 42 (or a sequence with 95-99% identity thereof) or a CD28 costimulatory domain having a sequence of SEQ ID NO:44, and a CD3 zeta stimulatory domain having a sequence of SEQ ID NO: 18 or SEQ ID NO:20 (or a sequence with 95-99% identity thereof).

[0477] The nucleic acid sequences coding for the desired molecules can be obtained using recombinant methods known in the art, such as, for example by screening libraries from cells expressing the gene, by deriving the gene from a vector known to include the same, or by isolating directly from cells and tissues containing the same, using standard techniques. Alternatively, the gene of interest can be produced synthetically, rather than cloned.

[0478] The present disclosure also provides vectors in which a nucleic acid of the present disclosure is inserted. Vectors derived from retroviruses such as the lentivirus are suitable tools to achieve long-term gene transfer since they allow long-term, stable integration of a transgene and its propagation in daughter cells. Lentiviral vectors have the added advantage over vectors derived from onco-retroviruses such as murine leukemia viruses in that they can transduce non-proliferating cells, such as hepatocytes. They also have the added advantage of low immunogenicity.

[0479] In another embodiment, the vector comprising the nucleic acid encoding the desired CAR of the invention is an adenoviral vector (A5/35). In another embodiment, the expression of nucleic acids encoding CARs can be accomplished using of transposons such as sleeping beauty, crisper, CAS9, and zinc finger nucleases. See below June et al. 2009Nature Reviews Immunology 9.10: 704-716, is incorporated herein by reference.

[0480] In brief summary, the expression of natural or synthetic nucleic acids encoding CARs is typically achieved by operably linking a nucleic acid encoding the CAR polypeptide or portions thereof to a promoter, and incorporating the construct into an expression vector. The vectors can be suitable for replication and integration eukaryotes. Typical cloning vectors contain transcription and translation terminators, initiation sequences, and promoters useful for regulation of the expression of the desired nucleic acid sequence.

[0481] The expression constructs of the present disclosure may also be used for nucleic acid immunization and gene therapy, using standard gene delivery protocols. Methods for gene delivery are known in the art. See, e.g., U.S. Pat. Nos. 5,399,346, 5,580,859, 5,589,466, incorporated by reference herein in their entireties. In another embodiment, the invention provides a gene therapy vector.

[0482] The nucleic acid can be cloned into a number of types of vectors. For example, the nucleic acid can be cloned into a vector including, but not limited to a plasmid, a phagemid, a phage derivative, an animal virus, and a cosmid. Vectors of particular interest include expression vectors, replication vectors, probe generation vectors, and sequencing vectors. Further, the expression vector may be provided to a cell in the form of a viral vector. Viral vector technology is well known in the art and is described, for example, in Sambrook et al., 2012, MOLECULAR CLONING: A LABORATORY MANUAL, volumes 1-4, Cold Spring Harbor Press, NY), and in other virology and molecular biology manuals. Viruses, which are useful as vectors include, but are not limited to, retroviruses, adenoviruses, adeno-associated viruses, herpes viruses, and lentiviruses. In general, a suitable vector contains an origin of replication functional in at least one organism, a promoter sequence, convenient restriction endonuclease sites, and one or more selectable markers, (e.g., WO 01/96584; WO 01/29058; and U.S. Pat. No. 6,326,193).

[0483] A number of viral based systems have been developed for gene transfer into mammalian cells. For example, retroviruses provide a convenient platform for gene delivery systems. A selected gene can be inserted into a vector and packaged in retroviral particles using techniques known in the art. The recombinant virus can then be isolated and delivered to cells of the subject either in vivo or ex vivo. A number of retroviral systems are known in the art. In some embodiments, adenovirus vectors are used. A number of adenovirus vectors are known in the art. In one embodiment, lentivirus vectors are used.

[0484] Additional promoter elements, e.g., enhancers, regulate the frequency of transcriptional initiation. Typically, these are located in the region 30-110 bp upstream of the start site, although a number of promoters have been shown to contain functional elements downstream of the start site as well. The spacing between promoter elements frequently is flexible, so that promoter function is preserved when elements are inverted or moved relative to one another. In the thymidine kinase (tk) promoter, the spacing between promoter elements can be increased to 50 bp apart before activity begins to decline. Depending on the promoter, it appears that individual elements can function either cooperatively or independently to activate transcription. Exemplary promoters include the CMV IE gene, EF-1α, ubiquitin C, or phosphoglycerokinase (PGK) promoters.

[0485] An example of a promoter that is capable of expressing a CAR encoding nucleic acid molecule in a mammalian T cell is the EF1a promoter. The native EF1a promoter drives expression of the alpha subunit of the elongation factor-1 complex, which is responsible for the enzymatic delivery of aminoacyl tRNAs to the ribosome. The EF1a promoter has been extensively used in mammalian expression plasmids and has been shown to be effective in driving CAR expression from nucleic acid molecules cloned into a lentiviral vector. See, e.g., Milone et al., Mol. Ther. 17(8): 1453-1464 (2009). In one aspect, the EF1a promoter comprises the sequence provided as SEQ ID NO: 1.

[0486] Another example of a promoter is the immediate early cytomegalovirus (CMV) promoter sequence. This promoter sequence is a strong constitutive promoter sequence capable of driving high levels of expression of any polynucleotide sequence operatively linked thereto. However, other constitutive promoter sequences may also be used, including, but not limited to the simian virus 40 (SV40) early promoter, mouse mammary tumor virus (MMTV), human immunodeficiency virus (HIV) long terminal repeat (LTR) promoter, MoMuLV promoter, an avian leukemia virus promoter, an Epstein-Barr virus immediate early promoter, a Rous sarcoma virus promoter, as well as human gene promoters such as, but not limited to, the actin promoter, the myosin promoter, the elongation factor-1α promoter, the hemoglobin promoter, and the creatine kinase promoter. Further, the invention should not be limited to the use of constitutive promoters. Inducible promoters are also contemplated as part of the invention. The use of an inducible promoter provides a molecular switch capable of turning on expression of the polynucleotide sequence which it is operatively linked when such expression is desired, or turning off the expression when expression is not desired. Examples of inducible promoters include, but are not limited to a metallothionine promoter, a glucocorticoid promoter, a progesterone promoter, and a tetracycline promoter.

[0487] Another example of a promoter is the phosphoglycerate kinase (PGK) promoter. In embodiments, a truncated PGK promoter (e.g., a PGK promoter with one or more, e.g., 1, 2, 5, 10, 100, 200, 300, or 400, nucleotide deletions when compared to the wild-type PGK promoter sequence) may be desired. The nucleotide sequences of exemplary PGK promoters are provided below.

### WT PGK Promoter

(SEQ ID NO: 101)
ACCCCTCTCTCCAGCCACTAAGCCAGTTGCTCCCTCGGCTGACGGCTGCA
CGCGAGGCCTCCGAACGTCTTACGCCTTGTGGCGCGCCCGTCCTTGTCCC
GGGTGTGATGGCGGGGTGTGGGGCGGAGGGCGTGGCGGGGAAGGGCCGGC
GACGAGAGCCGCGCGGGACGACTCGTCGGCGATAACCGGTGTCGGGTAGC
GCCAGCCGCGCGACGGTAACGAGGGACCGCGACAGGCAGACGCTCCCATG
ATCACTCTGCACGCCGAAGGCAAATAGTGCAGGCCGTGCGGCGCTTGGCG
TTCCTTGGAAGGGCTGAATCCCCGCCTCGTCCTTCGCAGCGGCCCCCCGG
GTGTTCCCATCGCCGCTTCTAGGCCCACTGCGACGCTTGCCTGCACTTCT
TACACGCTCTGGGTCCCAGCCGCGGCGACGCAAAGGGCCTTGGTGCGGGT
CTCGTCGGCGCAGGGACGCGTTTGGGTCCCGACGGAACCTTTTCCGCGTT
GGGGTTGGGGCACCATAAGCT

Exemplary truncated PGK Promoters:

PGK100:
(SEQ ID NO: 102)
ACCCCTCTCTCCAGCCACTAAGCCAGTTGCTCCCTCGGCTGACGGCTGCA
CGCGAGGCCTCCGAACGTCTTACGCCTTGTGGCGCGCCCGTCCTTGTCCC
GGGTGTGATGGCGGGGTG
PGK200:
(SEQ ID NO: 103)
ACCCCTCTCTCCAGCCACTAAGCCAGTTGCTCCCTCGGCTGACGGCTGCA
CGCGAGGCCTCCGAACGTCTTACGCCTTGTGGCGCGCCCGTCCTTGTCCC
GGGTGTGATGGCGGGGTGTGGGGCGGAGGGCGTGGCGGGGAAGGGCCGGC
GACGAGAGCCGCGCGGGACGACTCGTCGGCGATAACCGGTGTCGGGTAGC
GCCAGCCGCGCGACGGTAACG
PGK300:
(SEQ ID NO: 104)
ACCCCTCTCTCCAGCCACTAAGCCAGTTGCTCCCTCGGCTGACGGCTGCA
CGCGAGGCCTCCGAACGTCTTACGCCTTGTGGCGCGCCCGTCCTTGTCCC
GGGTGTGATGGCGGGGTGTGGGGCGGAGGGCGTGGCGGGGAAGGGCCGGC
GACGAGAGCCGCGCGGGACGACTCGTCGGCGATAACCGGTGTCGGGTAGC
GCCAGCCGCGCGACGGTAACGAGGGACCGCGACAGGCAGACGCTCCCATG
ATCACTCTGCACGCCGAAGGCAAATAGTGCAGGCCGTGCGGCGCTTGGCG
TTCCTTGGAAGGGCTGAATCCCCG
PGK400:
(SEQ ID NO: 105)
ACCCCTCTCTCCAGCCACTAAGCCAGTTGCTCCCTCGGCTGACGGCTGCA
CGCGAGGCCTCCGAACGTCTTACGCCTTGTGGCGCGCCCGTCCTTGTCCC
GGGTGTGATGGCGGGGTGTGGGGCGGAGGGCGTGGCGGGGAAGGGCCGGC
GACGAGAGCCGCGCGGGACGACTCGTCGGCGATAACCGGTGTCGGGTAGC
GCCAGCCGCGCGACGGTAACGAGGGACCGCGACAGGCAGACGCTCCCATG
ATCACTCTGCACGCCGAAGGCAAATAGTGCAGGCCGTGCGGCGCTTGGCG
TTCCTTGGAAGGGCTGAATCCCCGCCTCGTCCTTCGCAGCGGCCCCCCGG
GTGTTCCCATCGCCGCTTCTAGGCCCACTGCGACGCTTGCCTGCACTTCT
TACACGCTCTGGGTCCCAGCCG

[0489] A vector may also include, e.g., a signal sequence to facilitate secretion, a polyadenylation signal and transcription terminator (e.g., from Bovine Growth Hormone (BGH) gene), an element allowing episomal replication and replication in prokaryotes (e.g. SV40 origin and ColE1 or others known in the art) and/or elements to allow selection (e.g., ampicillin resistance gene and/or zeocin marker).

[0490] In order to assess the expression of a CAR polypeptide or portions thereof, the expression vector to be introduced into a cell can also contain either a selectable marker gene or a reporter gene or both to facilitate identification and selection of expressing cells from the population of cells sought to be transfected or infected through viral vectors. In other aspects, the selectable marker may be carried on a separate piece of DNA and used in a co-transfection procedure. Both selectable markers and reporter genes may be flanked with appropriate regulatory sequences to enable expression in the host cells. Useful selectable markers include, for example, antibiotic-resistance genes, such as neo and the like.

[0491] Reporter genes are used for identifying potentially transfected cells and for evaluating the functionality of regulatory sequences. In general, a reporter gene is a gene that is not present in or expressed by the recipient organism or tissue and that encodes a polypeptide whose expression is manifested by some easily detectable property, e.g., enzymatic activity. Expression of the reporter gene is assayed at a suitable time after the DNA has been introduced into the recipient cells. Suitable reporter genes may include genes encoding luciferase, beta-galactosidase, chloramphenicol acetyl transferase, secreted alkaline phosphatase, or the green fluorescent protein gene (e.g., Ui-Tei et al., 2000 FEBS Letters 479: 79-82). Suitable expression systems are well known and may be prepared using known techniques or obtained commercially. In general, the construct with the minimal 5′ flanking region showing the highest level of expression of reporter gene is identified as the promoter. Such promoter regions may be linked to a reporter gene and used to evaluate agents for the ability to modulate promoter-driven transcription.

[0492] In some embodiments, the a vector comprising a nuclei acid sequence encoding a CAR molecules described herein, e.g., a TA CAR and/or a BCA CAR, can further comprises a second nucleic acid sequence encoding a polypeptide, e.g., an agent that increases the activity of the CAR molecule. In some embodiments a single nucleic acid molecule, or vector comprising said nucleic acid molecule, encodes both the TA CAR, described herein, and the BCA CAR, described herein. In some embodiments, the nucleic acid encoding the TA CAR is under separate regulatory control (e.g., by a promoter described herein) from the nucleic acid endocing the BCA CAR (e.g., by a promoter described herein). In other embodiments, the two or more nucleic acid sequences are encoded by a single nucleic molecule in the same frame and as a single polypeptide chain. In this aspect, the two or more CARs (e.g., the TA CAR and the BCA CAR), can, e.g., be separated by one or more peptide cleavage sites. (e.g., an auto-cleavage site or a substrate for an intracellular protease). Examples of peptide cleavage sites include the following, wherein the GSG residues are optional:

T2A:
(SEQ ID NO: 106)
(GSG) E G R G S L L T C G D V E E N P G P
P2A:
(SEQ ID NO: 107)
(GSG) A T N F S L L K Q A G D V E E N P G P
E2A:
(SEQ ID NO: 108)
(GSG) Q C T N Y A L L K L A G D V E S N P G P
F2A:
(SEQ ID NO: 109)
(GSG) V K Q T L N F D L L K L A G D V E S N P G P

[0493] Methods of introducing and expressing genes into a cell are known in the art. In the context of an expression vector, the vector can be readily introduced into a host cell, e.g., mammalian, bacterial, yeast, or insect cell by any method in the art. For example, the expression vector can be transferred into a host cell by physical, chemical, or biological means.

[0494] Physical methods for introducing a polynucleotide into a host cell include calcium phosphate precipitation, lipofection, particle bombardment, microinjection, electroporation, and the like. Methods for producing cells comprising vectors and/or exogenous nucleic acids are well-known in the art. See, for example, Sambrook et al., 2012, MOLECULAR CLONING: A LABORATORY MANUAL, volumes 1-4, Cold Spring Harbor Press, NY). A preferred method for the introduction of a polynucleotide into a host cell is calcium phosphate transfection or electroporation.

[0495] Biological methods for introducing a polynucleotide of interest into a host cell include the use of DNA and RNA vectors. Viral vectors, and especially retroviral vectors, have become the most widely used method for inserting genes into mammalian, e.g., human cells. Other viral vectors can be derived from lentivirus, poxviruses, herpes simplex virus I, adenoviruses and adeno-associated viruses, and the like. See, for example, U.S. Pat. Nos. 5,350,674 and 5,585,362.

[0496] Chemical means for introducing a polynucleotide into a host cell include colloidal dispersion systems, such as macromolecule complexes, nanocapsules, microspheres, beads, and lipid-based systems including oil-in-water emulsions, micelles, mixed micelles, and liposomes. An exemplary colloidal system for use as a delivery vehicle in vitro and in vivo is a liposome (e.g., an artificial membrane vesicle). Other methods of state-of-the-art targeted delivery of nucleic acids are available, such as delivery of polynucleotides with targeted nanoparticles or other suitable sub-micron sized delivery system.

[0497] In the case where a non-viral delivery system is utilized, an exemplary delivery vehicle is a liposome. The use of lipid formulations is contemplated for the introduction of the nucleic acids into a host cell (in vitro, ex vivo or in vivo). In another aspect, the nucleic acid may be associated with a lipid. The nucleic acid associated with a lipid may be encapsulated in the aqueous interior of a liposome, interspersed within the lipid bilayer of a liposome, attached to a liposome via a linking molecule that is associated with both the liposome and the oligonucleotide, entrapped in a liposome, complexed with a liposome, dispersed in a solution containing a lipid, mixed with a lipid, combined with a lipid, contained as a suspension in a lipid, contained or complexed with a micelle, or otherwise associated with a lipid. Lipid, lipid/DNA or lipid/expression vector associated compositions are not limited to any particular structure in solution. For example, they may be present in a bilayer structure, as micelles, or with a “collapsed” structure. They may also simply be interspersed in a solution, possibly forming aggregates that are not uniform in size or shape. Lipids are fatty substances which may be naturally occurring or synthetic lipids. For example, lipids include the fatty droplets that naturally occur in the cytoplasm as well as the class of compounds which contain long-chain aliphatic hydrocarbons and their derivatives, such as fatty acids, alcohols, amines, amino alcohols, and aldehydes.

[0498] Lipids suitable for use can be obtained from commercial sources. For example, dimyristyl phosphatidylcholine (“DMPC”) can be obtained from Sigma, St. Louis, Mo.; dicetyl phosphate (“DCP”) can be obtained from K & K Laboratories (Plainview, N.Y.); cholesterol (“Choi”) can be obtained from Calbiochem-Behring; dimyristyl phosphatidylglycerol (“DMPG”) and other lipids may be obtained from Avanti Polar Lipids, Inc. (Birmingham, Ala.). Stock solutions of lipids in chloroform or chloroform/methanol can be stored at about −20° C. Chloroform is used as the only solvent since it is more readily evaporated than methanol. “Liposome” is a generic term encompassing a variety of single and multilamellar lipid vehicles formed by the generation of enclosed lipid bilayers or aggregates. Liposomes can be characterized as having vesicular structures with a phospholipid bilayer membrane and an inner aqueous medium. Multilamellar liposomes have multiple lipid layers separated by aqueous medium. They form spontaneously when phospholipids are suspended in an excess of aqueous solution. The lipid components undergo self-rearrangement before the formation of closed structures and entrap water and dissolved solutes between the lipid bilayers (Ghosh et al., 1991 Glycobiology 5: 505-10). However, compositions that have different structures in solution than the normal vesicular structure are also encompassed. For example, the lipids may assume a micellar structure or merely exist as nonuniform aggregates of lipid molecules. Also contemplated are lipofectamine-nucleic acid complexes.

[0499] Regardless of the method used to introduce exogenous nucleic acids into a host cell or otherwise expose a cell to the inhibitor of the present disclosure, in order to confirm the presence of the recombinant DNA sequence in the host cell, a variety of assays may be performed. Such assays include, for example, “molecular biological” assays well known to those of skill in the art, such as Southern and Northern blotting, RT-PCR and PCR; “biochemical” assays, such as detecting the presence or absence of a particular peptide, e.g., by immunological means (ELISAs and Western blots) or by assays described herein to identify agents falling within the scope of the invention.

[0500] The present disclosure further provides a vector comprising a CAR encoding nucleic acid molecule. In one embodiment, the vector comprises a TA CAR encoding nucleic acid molecule, e.g., as described herein. In one embodiment, the vector comprises a BCA CAR encoding nucleic acid molecule, e.g., as described herein. In one embodiment, the vector comprises a BCA CAR encoding nucleic acid molecule and a TA CAR encoding nucleic acid molecule. In one aspect, the one or more CAR vectors (e.g., the vector comprising the TA CAR encoding nucleic acid molecule and the vector comprising the BCA CAR encoding nucleic acid molecule, or the vector comprising the TA CAR encoding nucleic acid and the BCA CAR encoding nucleic acid) can be directly transduced into a cell, e.g., a T cell or a NK cell. In one aspect, the vector is a cloning or expression vector, e.g., a vector including, but not limited to, one or more plasmids (e.g., expression plasmids, cloning vectors, minicircles, minivectors, double minute chromosomes), retroviral and lentiviral vector constructs. In one aspect, the vector is capable of expressing the CAR construct in mammalian immune effector cells (e.g., T cells, NK cells).

[0501] In one embodiment, where stable expression of a TA CAR and/or a BCA CAR is desired, a vector comprising a TA CAR- and/or BCA CAR-encoding nucleic acid molecule is transduced into an immune effector cell. For example, immune effector cells with stable expression of a TA CAR and a BCA CAR can be generated using lentiviral vectors. Cells that exhibit stable expression of a TA CAR and a BCA CAR express the TA CAR and BCA CAR for at least 1 week, 2 weeks, 3 weeks, 4 weeks, 5 weeks, 6 weeks, 7 weeks, 8 weeks, 3 months, 6 months, 9 months, or 12 months after transduction.

[0502] In one embodiment, where transient expression of a TA CAR and/or a BCA CAR is desired, a TA CAR- and/or BCA CAR-encoding nucleic acid molecule is transfected into an immune effector cell. The TA CAR- and/or BCA CAR-encoding nucleic acid molecule may be a vector comprising a TA CAR- and/or BCA-CAR encoding nucleic acid molecule, or an in vitro transcribed RNA encoding TA CAR and/or BCA CAR. In vitro transcribed RNA CARs and methods for transfection into immune effector cells are further described below. Cells that exhibit transient expression of a TA CAR and/or a BCA CAR express the TA CAR and/or BCA CAR for 4, 5, 6, 7, 8, 9, 10, 11, 12, 13, 14, 15 days after transfection.

### RNA Transfection

[0503] Disclosed herein are methods for producing an in vitro transcribed RNA CAR, e.g., an in vitro transcribed RNA TA CAR and/or an in vitro transcribed RNA BCA CAR. The present disclosure also includes a CAR encoding RNA construct that can be directly transfected into a cell. A method for generating mRNA for use in transfection can involve in vitro transcription (IVT) of a template with specially designed primers, followed by polyA addition, to produce a construct containing 3′ and 5′ untranslated sequence (“UTR”), a 5′ cap and/or Internal Ribosome Entry Site (IRES), the nucleic acid to be expressed, and a polyA tail, typically 50-2000 bases in length (SEQ ID NO:32). RNA so produced can efficiently transfect different kinds of cells. In one aspect, the template includes sequences for the CAR.

[0504] In one aspect, a CAR of the present disclosure, e.g., a TA CAR and/or a BCA CAR, is encoded by a messenger RNA (mRNA). In one aspect, the mRNA encoding a TA CAR described herein and/or a BCA CAR described herein is introduced into a T cell or a NK cell for production of a cell that expresses both a TA CAR and a BCA CAR.

[0505] In one embodiment, the in vitro transcribed RNA CAR can be introduced to a cell as a form of transient transfection. The RNA is produced by in vitro transcription using a polymerase chain reaction (PCR)-generated template. DNA of interest from any source can be directly converted by PCR into a template for in vitro mRNA synthesis using appropriate primers and RNA polymerase. The source of the DNA can be, for example, genomic DNA, plasmid DNA, phage DNA, cDNA, synthetic DNA sequence or any other appropriate source of DNA. The desired template for in vitro transcription is a CAR described herein. For example, the template for the RNA CAR comprises an extracellular region comprising a single chain variable domain of an antibody to a tumor antigen or B cell antigen described herein; a hinge region (e.g., a hinge region described herein), a transmembrane domain (e.g., a transmembrane domain described herein such as a transmembrane domain of CD8a); and a cytoplasmic region that includes an intracellular signaling domain, e.g., an intracellular signaling domain described herein, e.g., comprising the signaling domain of CD3-zeta and the signaling domain of 4-1BB.

[0506] In one embodiment, the DNA to be used for PCR contains an open reading frame. The DNA can be from a naturally occurring DNA sequence from the genome of an organism. In one embodiment, the nucleic acid can include some or all of the 5′ and/or 3′ untranslated regions (UTRs). The nucleic acid can include exons and introns. In one embodiment, the DNA to be used for PCR is a human nucleic acid sequence. In another embodiment, the DNA to be used for PCR is a human nucleic acid sequence including the 5′ and 3′ UTRs. The DNA can alternatively be an artificial DNA sequence that is not normally expressed in a naturally occurring organism. An exemplary artificial DNA sequence is one that contains portions of genes that are ligated together to form an open reading frame that encodes a fusion protein. The portions of DNA that are ligated together can be from a single organism or from more than one organism.

[0507] PCR is used to generate a template for in vitro transcription of mRNA which is used for transfection. Methods for performing PCR are well known in the art. Primers for use in PCR are designed to have regions that are substantially complementary to regions of the DNA to be used as a template for the PCR. “Substantially complementary,” as used herein, refers to sequences of nucleotides where a majority or all of the bases in the primer sequence are complementary, or one or more bases are non-complementary, or mismatched. Substantially complementary sequences are able to anneal or hybridize with the intended DNA target under annealing conditions used for PCR The primers can be designed to be substantially complementary to any portion of the DNA template. For example, the primers can be designed to amplify the portion of a nucleic acid that is normally transcribed in cells (the open reading frame), including 5′ and 3′ UTRs. The primers can also be designed to amplify a portion of a nucleic acid that encodes a particular domain of interest. In one embodiment, the primers are designed to amplify the coding region of a human cDNA, including all or portions of the 5′ and 3′ UTRs. Primers useful for PCR can be generated by synthetic methods that are well known in the art. “Forward primers” are primers that contain a region of nucleotides that are substantially complementary to nucleotides on the DNA template that are upstream of the DNA sequence that is to be amplified. “Upstream” is used herein to refer to a location 5, to the DNA sequence to be amplified relative to the coding strand. “Reverse primers” are primers that contain a region of nucleotides that are substantially complementary to a double-stranded DNA template that are downstream of the DNA sequence that is to be amplified. “Downstream” is used herein to refer to a location 3′ to the DNA sequence to be amplified relative to the coding strand.

[0508] Any DNA polymerase useful for PCR can be used in the methods disclosed herein. The reagents and polymerase are commercially available from a number of sources.

[0509] Chemical structures with the ability to promote stability and/or translation efficiency may also be used. The RNA preferably has 5′ and 3′ UTRs. In one embodiment, the 5′ UTR is between one and 3000 nucleotides in length. The length of 5′ and 3′ UTR sequences to be added to the coding region can be altered by different methods, including, but not limited to, designing primers for PCR that anneal to different regions of the UTRs. Using this approach, one of ordinary skill in the art can modify the 5′ and 3′ UTR lengths required to achieve optimal translation efficiency following transfection of the transcribed RNA.

[0510] The 5′ and 3′ UTRs can be the naturally occurring, endogenous 5′ and 3′ UTRs for the nucleic acid of interest. Alternatively, UTR sequences that are not endogenous to the nucleic acid of interest can be added by incorporating the UTR sequences into the forward and reverse primers or by any other modifications of the template. The use of UTR sequences that are not endogenous to the nucleic acid of interest can be useful for modifying the stability and/or translation efficiency of the RNA. For example, it is known that AU-rich elements in 3′ UTR sequences can decrease the stability of mRNA. Therefore, 3′ UTRs can be selected or designed to increase the stability of the transcribed RNA based on properties of UTRs that are well known in the art.

[0511] In one embodiment, the 5′ UTR can contain the Kozak sequence of the endogenous nucleic acid. Alternatively, when a 5′ UTR that is not endogenous to the nucleic acid of interest is being added by PCR as described above, a consensus Kozak sequence can be redesigned by adding the 5′ UTR sequence. Kozak sequences can increase the efficiency of translation of some RNA transcripts, but does not appear to be required for all RNAs to enable efficient translation. The requirement for Kozak sequences for many mRNAs is known in the art. In other embodiments the 5′ UTR can be 5′UTR of an RNA virus whose RNA genome is stable in cells. In other embodiments various nucleotide analogues can be used in the 3′ or 5′ UTR to impede exonuclease degradation of the mRNA.

[0512] To enable synthesis of RNA from a DNA template without the need for gene cloning, a promoter of transcription should be attached to the DNA template upstream of the sequence to be transcribed. When a sequence that functions as a promoter for an RNA polymerase is added to the 5′ end of the forward primer, the RNA polymerase promoter becomes incorporated into the PCR product upstream of the open reading frame that is to be transcribed. In one preferred embodiment, the promoter is a T7 polymerase promoter, as described elsewhere herein. Other useful promoters include, but are not limited to, T3 and SP6 RNA polymerase promoters. Consensus nucleotide sequences for T7, T3 and SP6 promoters are known in the art.

[0513] In a preferred embodiment, the mRNA has both a cap on the 5′ end and a 3′ poly(A) tail which determine ribosome binding, initiation of translation and stability mRNA in the cell. On a circular DNA template, for instance, plasmid DNA, RNA polymerase produces a long concatameric product which is not suitable for expression in eukaryotic cells. The transcription of plasmid DNA linearized at the end of the 3′ UTR results in normal sized mRNA which is not effective in eukaryotic transfection even if it is polyadenylated after transcription.

[0514] On a linear DNA template, phage T7 RNA polymerase can extend the 3′ end of the transcript beyond the last base of the template (Schenborn and Mierendorf, Nuc Acids Res., 13:6223-36 (1985); Nacheva and Berzal-Herranz, Eur. J. Biochem., 270:1485-65 (2003).

[0515] The conventional method of integration of polyA/T stretches into a DNA template is molecular cloning. However polyA/T sequence integrated into plasmid DNA can cause plasmid instability, which is why plasmid DNA templates obtained from bacterial cells are often highly contaminated with deletions and other aberrations. This makes cloning procedures not only laborious and time consuming but often not reliable. That is why a method which allows construction of DNA templates with polyA/T 3′ stretch without cloning highly desirable.

[0516] The polyA/T segment of the transcriptional DNA template can be produced during PCR by using a reverse primer containing a polyT tail, such as 100T tail (SEQ ID NO: 35) (size can be 50-5000 T (SEQ ID NO: 265)), or after PCR by any other method, including, but not limited to, DNA ligation or in vitro recombination. Poly(A) tails also provide stability to RNAs and reduce their degradation. Generally, the length of a poly(A) tail positively correlates with the stability of the transcribed RNA. In one embodiment, the poly(A) tail is between 100 and 5000 adenosines (SEQ ID NO: 82).

[0517] Poly(A) tails of RNAs can be further extended following in vitro transcription with the use of a poly(A) polymerase, such as E. coli polyA polymerase (E-PAP). In one embodiment, increasing the length of a poly(A) tail from 100 nucleotides to between 300 and 400 nucleotides (SEQ ID NO: 38) results in about a two-fold increase in the translation efficiency of the RNA. Additionally, the attachment of different chemical groups to the 3′ end can increase mRNA stability. Such attachment can contain modified/artificial nucleotides, aptamers and other compounds. For example, ATP analogs can be incorporated into the poly(A) tail using poly(A) polymerase. ATP analogs can further increase the stability of the RNA.

[0518] 5′ caps on also provide stability to RNA molecules. In a preferred embodiment, RNAs produced by the methods disclosed herein include a 5′ cap. The 5′ cap is provided using techniques known in the art and described herein (Cougot, et al., Trends in Biochem. Sci., 29:436-444 (2001); Stepinski, et al., RNA, 7:1468-95 (2001); Elango, et al., Biochim. Biophys. Res. Commun., 330:958-966 (2005)).

[0519] The RNAs produced by the methods disclosed herein can also contain an internal ribosome entry site (IRES) sequence. The IRES sequence may be any viral, chromosomal or artificially designed sequence which initiates cap-independent ribosome binding to mRNA and facilitates the initiation of translation. Any solutes suitable for cell electroporation, which can contain factors facilitating cellular permeability and viability such as sugars, peptides, lipids, proteins, antioxidants, and surfactants can be included.

[0520] RNA can be introduced into target cells using any of a number of different methods, for instance, commercially available methods which include, but are not limited to, electroporation (Amaxa Nucleofector-II (Amaxa Biosystems, Cologne, Germany)), (ECM 830 (BTX) (Harvard Instruments, Boston, Mass.) or the Gene Pulser II (BioRad, Denver, Colo.), Multiporator (Eppendort, Hamburg Germany), cationic liposome mediated transfection using lipofection, polymer encapsulation, peptide mediated transfection, or biolistic particle delivery systems such as “gene guns” (see, for example, Nishikawa, et al. Hum Gene Ther., 12(8):861-70 (2001).

### Non-Viral Delivery Methods

[0521] In some aspects, non-viral methods can be used to deliver a nucleic acid encoding a CAR described herein, e.g., a TA CAR and/or a BCA CAR, into a cell or tissue or a subject. In some embodiments, the non-viral method includes the use of a transposon (also called a transposable element). In some embodiments, a transposon is a piece of DNA that can insert itself at a location in a genome, for example, a piece of DNA that is capable of self-replicating and inserting its copy into a genome, or a piece of DNA that can be spliced out of a longer nucleic acid and inserted into another place in a genome. For example, a transposon comprises a DNA sequence made up of inverted repeats flanking genes for transposition. Exemplary methods of nucleic acid delivery using a transposon include a Sleeping Beauty transposon system (SBTS) and a piggyBac (PB) transposon system. See, e.g., Aronovich et al. Hum. Mol. Genet. 20.R1(2011):R14-20; Singh et al. Cancer Res. 15(2008):2961-2971; Huang et al. Mol. Ther. 16(2008):580-589; Grabundzija et al. Mol. Ther. 18(2010):1200-1209; Kebriaei et al. Blood. 122.21(2013):166; Williams. Molecular Therapy 16.9(2008):1515-16; Bell et al. Nat. Protoc. 2.12(2007):3153-65; and Ding et al. Cell. 122.3(2005):473-83, all of which are incorporated herein by reference.

[0522] The SBTS includes two components: 1) a transposon containing a transgene and 2) a source of transposase enzyme. The transposase can transpose the transposon from a carrier plasmid (or other donor DNA) to a target DNA, such as a host cell chromosome/genome. For example, the transposase binds to the carrier plasmid/donor DNA, cuts the transposon (including transgene(s)) out of the plasmid, and inserts it into the genome of the host cell. See, e.g., Aronovich et al. supra.

[0523] Exemplary transposons include a pT2-based transposon. See, e.g., Grabundzija et al. Nucleic Acids Res. 41.3(2013):1829-47; and Singh et al. Cancer Res. 68.8(2008): 2961-2971, all of which are incorporated herein by reference. Exemplary transposases include a Tcl/mariner-type transposase, e.g., the SB10 transposase or the SB11 transposase (a hyperactive transposase which can be expressed, e.g., from a cytomegalovirus promoter). See, e.g., Aronovich et al.; Kebriaei et al.: and Grabundzija et al., all of which are incorporated herein by reference.

[0524] Use of the SBTS permits efficient integration and expression of a transgene, e.g., a nucleic acid encoding a CAR described herein. Provided herein are methods of generating a cell, e.g., T cell or NK cell, that stably expresses a CAR described herein, e.g., using a transposon system such as SBTS.

[0525] In accordance with methods described herein, in some embodiments, one or more nucleic acids, e.g., plasmids, containing the SBTS components are delivered to a cell (e.g., T or NK cell). For example, the nucleic acid(s) are delivered by standard methods of nucleic acid (e.g., plasmid DNA) delivery, e.g., methods described herein, e.g., electroporation, transfection, or lipofection. In some embodiments, the nucleic acid contains a transposon comprising a transgene, e.g., a nucleic acid encoding a CAR described herein. In some embodiments, the nucleic acid contains a transposon comprising a transgene (e.g., a nucleic acid encoding a CAR described herein) as well as a nucleic acid sequence encoding a transposase enzyme. In other embodiments, a system with two nucleic acids is provided, e.g., a dual-plasmid system, e.g., where a first plasmid contains a transposon comprising a transgene, and a second plasmid contains a nucleic acid sequence encoding a transposase enzyme. For example, the first and the second nucleic acids are co-delivered into a host cell.

[0526] In some embodiments, cells, e.g., T or NK cells, are generated that express a TA CAR and BCA CAR described herein by using a combination of gene insertion using the SBTS and genetic editing using a nuclease (e.g., Zinc finger nucleases (ZFNs), Transcription Activator-Like Effector Nucleases (TALENs), the CRISPR/Cas system, or engineered meganuclease re-engineered homing endonucleases).

[0527] In some embodiments, use of a non-viral method of delivery permits reprogramming of cells, e.g., T or NK cells, and direct infusion of the cells into a subject. Advantages of non-viral vectors include but are not limited to the ease and relatively low cost of producing sufficient amounts required to meet a patient population, stability during storage, and lack of immunogenicity.

### Sources of Cells

[0528] Prior to expansion and genetic modification, e.g., to express both a TA CAR and a BCA CAR described herein, a source of cells, e.g., T cell or NK cells, can be obtained from a subject. The term “subject” is intended to include living organisms in which an immune response can be elicited (e.g., mammals). Examples of subjects include humans, dogs, cats, mice, rats, and transgenic species thereof. T cells can be obtained from a number of sources, including peripheral blood mononuclear cells, bone marrow, lymph node tissue, cord blood, thymus tissue, tissue from a site of infection, ascites, pleural effusion, spleen tissue, and tumors. In certain aspects of the present disclosure, any number of T cell lines available in the art, may be used. In certain aspects of the present disclosure, T cells can be obtained from a unit of blood collected from a subject using any number of techniques known to the skilled artisan, such as Ficoll™ separation. In one preferred aspect, cells from the circulating blood of an individual are obtained by apheresis. The apheresis product typically contains lymphocytes, including T cells, monocytes, granulocytes, B cells, other nucleated white blood cells, red blood cells, and platelets. In one aspect, the cells collected by apheresis may be washed to remove the plasma fraction and to place the cells in an appropriate buffer or media for subsequent processing steps. In one aspect of the invention, the cells are washed with phosphate buffered saline (PBS). In an alternative aspect, the wash solution lacks calcium and may lack magnesium or may lack many if not all divalent cations. Initial activation steps in the absence of calcium can lead to magnified activation. As those of ordinary skill in the art would readily appreciate a washing step may be accomplished by methods known to those in the art, such as by using a semi-automated “flow-through” centrifuge (for example, the Cobe 2991 cell processor, the Baxter CytoMate, or the Haemonetics Cell Saver 5) according to the manufacturer's instructions. After washing, the cells may be resuspended in a variety of biocompatible buffers, such as, for example, Ca-free, Mg-free PBS, PlasmaLyte A, or other saline solution with or without buffer. Alternatively, the undesirable components of the apheresis sample may be removed and the cells directly resuspended in culture media.

[0529] It is recognized that the methods of the application can utilize culture media conditions comprising 5% or less, for example 2%, human AB serum, and employ known culture media conditions and compositions, for example those described in Smith et al., “Ex vivo expansion of human T cells for adoptive immunotherapy using the novel Xeno-free CTS Immune Cell Serum Replacement” Clinical & Translational Immunology (2015) 4, e31; doi: 10.1038/cti.2014.31.

[0530] In one aspect, T cells are isolated from peripheral blood lymphocytes by lysing the red blood cells and depleting the monocytes, for example, by centrifugation through a PERCOLL™ gradient or by counterflow centrifugal elutriation. A specific subpopulation of T cells, such as CD3+, CD28+, CD4+, CD8+, CD45RA+, and CD45RO+T cells, can be further isolated by positive or negative selection techniques. For example, in one aspect, T cells are isolated by incubation with anti-CD3/anti-CD28 (e.g., 3×28)-conjugated beads, such as DYNABEADS® M-450 CD3/CD28 T, for a time period sufficient for positive selection of the desired T cells. In one aspect, the time period is about 30 minutes. In a further aspect, the time period ranges from 30 minutes to 36 hours or longer and all integer values there between. In a further aspect, the time period is at least 1, 2, 3, 4, 5, or 6 hours. In yet another preferred aspect, the time period is 10 to 24 hours. In one aspect, the incubation time period is 24 hours. Longer incubation times may be used to isolate T cells in any situation where there are few T cells as compared to other cell types, such in isolating tumor infiltrating lymphocytes (TIL) from tumor tissue or from immunocompromised individuals. Further, use of longer incubation times can increase the efficiency of capture of CD8+ T cells. Thus, by simply shortening or lengthening the time T cells are allowed to bind to the CD3/CD28 beads and/or by increasing or decreasing the ratio of beads to T cells (as described further herein), subpopulations of T cells can be preferentially selected for or against at culture initiation or at other time points during the process. Additionally, by increasing or decreasing the ratio of anti-CD3 and/or anti-CD28 antibodies on the beads or other surface, subpopulations of T cells can be preferentially selected for or against at culture initiation or at other desired time points. The skilled artisan would recognize that multiple rounds of selection can also be used in the context of this invention. In certain aspects, it may be desirable to perform the selection procedure and use the “unselected” cells in the activation and expansion process. “Unselected” cells can also be subjected to further rounds of selection.

[0531] Enrichment of a T cell population by negative selection can be accomplished with a combination of antibodies directed to surface markers unique to the negatively selected cells. One method is cell sorting and/or selection via negative magnetic immunoadherence or flow cytometry that uses a cocktail of monoclonal antibodies directed to cell surface markers present on the cells negatively selected. For example, to enrich for CD4+ cells by negative selection, a monoclonal antibody cocktail typically includes antibodies to CD14, CD20, CD11b, CD16, HLA-DR, and CD8. In certain aspects, it may be desirable to enrich for or positively select for regulatory T cells which typically express CD4+, CD25+, CD62Lhi, G1TR+, and FoxP3+. Alternatively, in certain aspects, T regulatory cells are depleted by anti-C25 conjugated beads or other similar method of selection.

[0532] The methods described herein can include, e.g., selection of a specific subpopulation of immune effector cells, e.g., T cells, that are a T regulatory cell-depleted population, CD25+ depleted cells, using, e.g., a negative selection technique, e.g., described herein. Preferably, the population of T regulatory depleted cells contains less than 30%, 25%, 20%, 15%, 10%, 5%, 4%, 3%, 2%, 1% of CD25+ cells.

[0533] In one embodiment, T regulatory cells, e.g., CD25+ T cells, are removed from the population using an anti-CD25 antibody, or fragment thereof, or a CD25-binding ligand, IL-2.

[0534] In one embodiment, the anti-CD25 antibody, or fragment thereof, or CD25-binding ligand is conjugated to a substrate, e.g., a bead, or is otherwise coated on a substrate, e.g., a bead. In one embodiment, the anti-CD25 antibody, or fragment thereof, is conjugated to a substrate as described herein.

[0535] In one embodiment, the T regulatory cells, e.g., CD25+ T cells, are removed from the population using CD25 depletion reagent from Miltenyi™. In one embodiment, the ratio of cells to CD25 depletion reagent is 1e7 cells to 20 uL, or 1e7 cells to 15 uL, or 1e7 cells to 10 uL, or 1e7 cells to 5 uL, or 1e7 cells to 2.5 uL, or 1e7 cells to 1.25 uL. In one embodiment, e.g., for T regulatory cells, e.g., CD25+ depletion, greater than 500 million cells/ml is used. In a further aspect, a concentration of cells of 600, 700, 800, or 900 million cells/ml is used.

[0536] In one embodiment, the population of immune effector cells to be depleted includes about 6×10⁹ CD25+ T cells. In other aspects, the population of immune effector cells to be depleted include about 1×10⁹ to 1×10¹⁰ CD25+ T cell, and any integer value in between. In one embodiment, the resulting population T regulatory depleted cells has 2×10⁹T regulatory cells, e.g., CD25+ cells, or less (e.g., 1×10⁹, 5×10⁸, 1×10⁸, 5×10⁷, 1×10′, or less CD25+ cells).

[0537] In one embodiment, the T regulatory cells, e.g., CD25+ cells, are removed from the population using the CliniMAC system with a depletion tubing set, such as, e.g., tubing 162-01. In one embodiment, the CliniMAC system is run on a depletion setting such as, e.g., DEPLETION2.1.

[0538] Without wishing to be bound by a particular theory, decreasing the level of negative regulators of immune cells (e.g., decreasing the number of unwanted immune cells, e.g., T_{RE}G cells), in a subject prior to apheresis or during manufacturing of a CAR-expressing cell product can reduce the risk of subject relapse. For example, methods of depleting T_{RE}G cells are known in the art. Methods of decreasing T_{REG} cells include, but are not limited to, cyclophosphamide, anti-GITR antibody (an anti-GITR antibody described herein), CD25-depletion, and combinations thereof.

[0539] In some embodiments, the manufacturing methods comprise reducing the number of (e.g., depleting) T_{REG} cells prior to manufacturing of the CAR-expressing cell. For example, manufacturing methods comprise contacting the sample, e.g., the apheresis sample, with an anti-GITR antibody and/or an anti-CD25 antibody (or fragment thereof, or a CD25-binding ligand), e.g., to deplete T_{REG} cells prior to manufacturing of the CAR-expressing cell (e.g., T cell, NK cell) product.

[0540] In an embodiment, a subject is pre-treated with one or more therapies that reduce T_{REG} cells prior to collection of cells for CAR-expressing cell product manufacturing, thereby reducing the risk of subject relapse to CAR-expressing cell treatment. In an embodiment, methods of decreasing T_{REG} cells include, but are not limited to, administration to the subject of one or more of cyclophosphamide, anti-GITR antibody, CD25-depletion, or a combination thereof. Administration of one or more of cyclophosphamide, anti-GITR antibody, CD25-depletion, or a combination thereof, can occur before, during or after an infusion of the CAR-expressing cell product.

[0541] In an embodiment, a subject is pre-treated with cyclophosphamide prior to collection of cells for CAR-expressing cell product manufacturing, thereby reducing the risk of subject relapse to CAR-expressing cell treatment. In an embodiment, a subject is pre-treated with an anti-GITR antibody prior to collection of cells for CAR-expressing cell product manufacturing, thereby reducing the risk of subject relapse to CAR-expressing cell treatment.

[0542] In one embodiment, the population of cells to be removed are neither the regulatory T cells or tumor cells, but cells that otherwise negatively affect the expansion and/or function of CART cells, e.g. cells expressing CD14, CD11b, CD33, CD15, or other markers expressed by potentially immune suppressive cells. In one embodiment, such cells are envisioned to be removed concurrently with regulatory T cells and/or tumor cells, or following said depletion, or in another order.

[0543] The methods described herein can include more than one selection step, e.g., more than one depletion step. Enrichment of a T cell population by negative selection can be accomplished, e.g., with a combination of antibodies directed to surface markers unique to the negatively selected cells. One method is cell sorting and/or selection via negative magnetic immunoadherence or flow cytometry that uses a cocktail of monoclonal antibodies directed to cell surface markers present on the cells negatively selected. For example, to enrich for CD4+ cells by negative selection, a monoclonal antibody cocktail can include antibodies to CD14, CD20, CD11b, CD16, HLA-DR, and CD8.

[0544] The methods described herein can further include removing cells from the population which express a tumor antigen, e.g., a tumor antigen that does not comprise CD25, e.g., CD19, CD30, CD38, CD123, CD20, CD14 or CD11b, to thereby provide a population of T regulatory depleted, e.g., CD25+ depleted, and tumor antigen depleted cells that are suitable for expression of a CAR, e.g., a CAR described herein. In one embodiment, tumor antigen expressing cells are removed simultaneously with the T regulatory, e.g., CD25+ cells. For example, an anti-CD25 antibody, or fragment thereof, and an anti-tumor antigen antibody, or fragment thereof, can be attached to the same substrate, e.g., bead, which can be used to remove the cells or an anti-CD25 antibody, or fragment thereof, or the anti-tumor antigen antibody, or fragment thereof, can be attached to separate beads, a mixture of which can be used to remove the cells. In other embodiments, the removal of T regulatory cells, e.g., CD25+ cells, and the removal of the tumor antigen expressing cells is sequential, and can occur, e.g., in either order.

[0545] Also provided are methods that include removing cells from the population which express a check point inhibitor, e.g., a check point inhibitor described herein, e.g., one or more of PD 1+ cells, LAG3+ cells, and TIM3+ cells, to thereby provide a population of T regulatory depleted, e.g., CD25+ depleted cells, and check point inhibitor depleted cells, e.g., PD1+, LAG3+ and/or TIM3+ depleted cells. Exemplary check point inhibitors include B7-H1, B7-1, CD160, P1H, 2B4, PD1, TIM3, CEACAM (e.g., CEACAM-1, CEACAM-3 and/or CEACAM-5), LAG3, TIGIT, CTLA-4, BTLA and LAIR1. In one embodiment, check point inhibitor expressing cells are removed simultaneously with the T regulatory, e.g., CD25+ cells. For example, an anti-CD25 antibody, or fragment thereof, and an anti-check point inhibitor antibody, or fragment thereof, can be attached to the same bead which can be used to remove the cells, or an anti-CD25 antibody, or fragment thereof, and the anti-check point inhibitor antibody, or fragment there, can be attached to separate beads, a mixture of which can be used to remove the cells. In other embodiments, the removal of T regulatory cells, e.g., CD25+ cells, and the removal of the check point inhibitor expressing cells is sequential, and can occur, e.g., in either order.

[0546] In one embodiment, a T cell population can be selected that expresses one or more of IFN-γ, TNFα, IL-17A, IL-2, IL-3, IL-4, GM-CSF, IL-10, IL-13, granzyme B, and perforin, or other appropriate molecules, e.g., other cytokines. Methods for screening for cell expression can be determined, e.g., by the methods described in PCT Publication No.: WO 2013/126712. For isolation of a desired population of cells by positive or negative selection, the concentration of cells and surface (e.g., particles such as beads) can be varied. In certain aspects, it may be desirable to significantly decrease the volume in which beads and cells are mixed together (e.g., increase the concentration of cells), to ensure maximum contact of cells and beads. For example, in one aspect, a concentration of 2 billion cells/ml is used. In one aspect, a concentration of 1 billion cells/ml is used. In a further aspect, greater than 100 million cells/ml is used. In a further aspect, a concentration of cells of 10, 15, 20, 25, 30, 35, 40, 45, or 50 million cells/ml is used. In yet one aspect, a concentration of cells from 75, 80, 85, 90, 95, or 100 million cells/ml is used. In further aspects, concentrations of 125 or 150 million cells/ml can be used. Using high concentrations can result in increased cell yield, cell activation, and cell expansion. Further, use of high cell concentrations allows more efficient capture of cells that may weakly express target antigens of interest, such as CD28-negative T cells, or from samples where there are many tumor cells present (e.g., leukemic blood, tumor tissue, etc.). Such populations of cells may have therapeutic value and would be desirable to obtain. For example, using high concentration of cells allows more efficient selection of CD8+ T cells that normally have weaker CD28 expression.

[0547] In a related aspect, it may be desirable to use lower concentrations of cells. By significantly diluting the mixture of T cells and surface (e.g., particles such as beads), interactions between the particles and cells is minimized. This selects for cells that express high amounts of desired antigens to be bound to the particles. For example, CD4+ T cells express higher levels of CD28 and are more efficiently captured than CD8+ T cells in dilute concentrations. In one aspect, the concentration of cells used is 5×10e6/ml. In other aspects, the concentration used can be from about 1×10⁵/ml to 1×10⁶/ml, and any integer value in between.

[0548] In other aspects, the cells may be incubated on a rotator for varying lengths of time at varying speeds at either 2-10° C. or at room temperature.

[0549] T cells for stimulation can also be frozen after a washing step. Wishing not to be bound by theory, the freeze and subsequent thaw step provides a more uniform product by removing granulocytes and to some extent monocytes in the cell population. After the washing step that removes plasma and platelets, the cells may be suspended in a freezing solution. While many freezing solutions and parameters are known in the art and will be useful in this context, one method involves using PBS containing 20% DMSO and 8% human serum albumin, or culture media containing 100/% Dextran 40 and 5% Dextrose, 200% Human Serum Albumin and 7.5% DMSO, or 31.25% Plasmalyte-A, 31.25% Dextrose 5%, 0.45% NaCl, 10% Dextran 40 and 5% Dextrose, 20% Human Serum Albumin, and 7.5% DMSO or other suitable cell freezing media containing for example, Hespan and PlasmaLyte A, the cells then are frozen to −80° C. at a rate of 1 per minute and stored in the vapor phase of a liquid nitrogen storage tank. Other methods of controlled freezing may be used as well as uncontrolled freezing immediately at −20° C. or in liquid nitrogen.

[0550] In certain aspects, cryopreserved cells are thawed and washed as described herein and allowed to rest for one hour at room temperature prior to activation using the methods of the present disclosure.

[0551] Also contemplated in the context of the invention is the collection of blood samples or apheresis product from a subject at a time period prior to when the expanded cells as described herein might be needed. As such, the source of the cells to be expanded can be collected at any time point necessary, and desired cells, such as T cells, isolated and frozen for later use in T cell therapy for any number of diseases or conditions that would benefit from T cell therapy, such as those described herein. In one aspect a blood sample or an apheresis is taken from a generally healthy subject. In certain aspects, a blood sample or an apheresis is taken from a generally healthy subject who is at risk of developing a disease, but who has not yet developed a disease, and the cells of interest are isolated and frozen for later use. In certain aspects, the T cells may be expanded, frozen, and used at a later time. In certain aspects, samples are collected from a patient shortly after diagnosis of a particular disease as described herein but prior to any treatments. In a further aspect, the cells are isolated from a blood sample or an apheresis from a subject prior to any number of relevant treatment modalities, including but not limited to treatment with agents such as natalizumab, efalizumab, antiviral agents, chemotherapy, radiation, immunosuppressive agents, such as cyclosporin, azathioprine, methotrexate, mycophenolate, and FK506, antibodies, or other immunoablative agents such as CAMPATH, anti-CD3 antibodies, cytoxan, fludarabine, cyclosporin, FK506, rapamycin, mycophenolic acid, steroids, FR901228, and irradiation.

[0552] In a further aspect of the present disclosure, T cells are obtained from a patient directly following treatment that leaves the subject with functional T cells. In this regard, it has been observed that following certain cancer treatments, in particular treatments with drugs that damage the immune system, shortly after treatment during the period when patients would normally be recovering from the treatment, the quality of T cells obtained may be optimal or improved for their ability to expand ex vivo. Likewise, following ex vivo manipulation using the methods described herein, these cells may be in a preferred state for enhanced engraftment and in vivo expansion. Thus, it is contemplated within the context of the present disclosure to collect blood cells, including T cells, dendritic cells, or other cells of the hematopoietic lineage, during this recovery phase. Further, in certain aspects, mobilization (for example, mobilization with GM-CSF) and conditioning regimens can be used to create a condition in a subject wherein repopulation, recirculation, regeneration, and/or expansion of particular cell types is favored, especially during a defined window of time following therapy. Illustrative cell types include T cells, B cells, dendritic cells, and other cells of the immune system.

[0553] In one embodiment, a T cell population is diaglycerol kinase (DGK)-deficient. DGK-deficient cells include cells that do not express DGK RNA or protein, or have reduced or inhibited DGK activity. DGK-deficient cells can be generated by genetic approaches, e.g., administering RNA-interfering agents, e.g., siRNA, shRNA, miRNA, to reduce or prevent DGK expression. Alternatively, DGK-deficient cells can be generated by treatment with DGK inhibitors described herein.

[0554] In one embodiment, a T cell population is Ikaros-deficient. Ikaros-deficient cells include cells that do not express Ikaros RNA or protein, or have reduced or inhibited Ikaros activity, Ikaros-deficient cells can be generated by genetic approaches, e.g., administering RNA-interfering agents, e.g., siRNA, shRNA, miRNA, to reduce or prevent Ikaros expression. Alternatively, Ikaros-deficient cells can be generated by treatment with Ikaros inhibitors, e.g., lenalidomide.

[0555] In embodiments, a T cell population is DGK-deficient and Ikaros-deficient, e.g., does not express DGK and Ikaros, or has reduced or inhibited DGK and Ikaros activity. Such DGK and Ikaros-deficient cells can be generated by any of the methods described herein.

[0556] In an embodiment, the NK cells are obtained from the subject. In another embodiment, the NK cells are an NK cell line, e.g., NK-92 cell line (Conkwest).

### Allogeneic CAR Immune Effector Cells

[0557] In embodiments described herein, the immune effector cell can be an allogeneic immune effector cell, e.g., T cell or NK cell. For example, the cell can be an allogeneic T cell, e.g., an allogeneic T cell lacking expression of a functional T cell receptor (TCR) and/or human leukocyte antigen (HLA), e.g., HLA class I and/or HLA class H.

[0558] A T cell lacking a functional TCR can be, e.g., engineered such that it does not express any functional TCR on its surface, engineered such that it does not express one or more subunits that comprise a functional TCR or engineered such that it produces very little functional TCR on its surface. Alternatively, the T cell can express a substantially impaired TCR, e.g., by expression of mutated or truncated forms of one or more of the subunits of the TCR The term “substantially impaired TCR” means that this TCR will not elicit an adverse immune reaction in a host.

[0559] A T cell described herein can be, e.g., engineered such that it does not express a functional HLA on its surface. For example, a T cell described herein, can be engineered such that cell surface expression HLA, e.g., HLA class I and/or HLA class II, is downregulated.

[0560] In some embodiments, the T cell can lack a functional TCR and a functional HLA, e.g., HLA class I and/or HLA class H.

[0561] Modified T cells that lack expression of a functional TCR and/or HLA can be obtained by any suitable means, including a knock out or knock down of one or more subunit of TCR or HLA. For example, the T cell can include a knock down of TCR and/or HLA using siRNA, shRNA, clustered regularly interspaced short palindromic repeats (CRISPR) transcription-activator like effector nuclease (TALEN), or zinc finger endonuclease (ZFN).

[0562] In some embodiments, the allogeneic cell can be a cell which does not expresses or expresses at low levels an inhibitory molecule, e.g. by any method described herein. For example, the cell can be a cell that does not express or expresses at low levels an inhibitory molecule, e.g., that can decrease the ability of a CAR-expressing cell to mount an immune effector response. Examples of inhibitory molecules include PD1, PD-L1, CTLA4, TIM3, LAG3, VISTA, BTLA, TIGIT, LAIR1, CD160, 2B4, CD80, CD86, B7-H3 (CD276), B7-H4 (VTCN1), HVEM (TNFRSF14 or CD270), KIR, A2aR, MHC class I, MHC class II, GAL9, adenosine, and TGF beta. Inhibition of an inhibitory molecule, e.g., by inhibition at the DNA, RNA or protein level, can optimize a CAR-expressing cell performance. In embodiments, an inhibitory nucleic acid, e.g., an inhibitory nucleic acid, e.g., a dsRNA, e.g., an siRNA or shRNA, a clustered regularly interspaced short palindromic repeats (CRISPR), a transcription-activator like effector nuclease (TALEN), or a zinc finger endonuclease (ZFN), e.g., as described herein, can be used.

siRNA and shRNA to Inhibit TCR or HLA

[0563] In some embodiments, TCR expression and/or HLA expression can be inhibited using siRNA or shRNA that targets a nucleic acid encoding a TCR and/or HLA, and/or an inhibitory molecule described herein (e.g., PD1, PD-L1, PD-L2, CTLA4, TIM3, CEACAM (e.g., CEACAM-1, CEACAM-3 and/or CEACAM-5), LAG3, VISTA, BTLA, TIGIT, LAIR1, CD160, 2B4, CD80, CD86, B7-H3 (CD276), B7-H4 (VTCN1), HVEM (TNFRSF14 or CD270), KIR, A2aR, MHC class I, MHC class II, GAL9, adenosine, and TGF beta), in a cell, e.g., T cell. Expression systems for siRNA and shRNAs, and exemplary shRNAs, are described, e.g., in paragraphs 649 and 650 of International Publication WO2015/142675, filed Mar. 13, 2015, which is incorporated by reference in its entirety.

### CRISPR to Inhibit TCR or HLA

[0564] “CRISPR” or “CRISPR to TCR and/or HLA” or “CRISPR to inhibit TCR and/or HLA” as used herein refers to a set of clustered regularly interspaced short palindromic repeats, or a system comprising such a set of repeats. “Cas”, as used herein, refers to a CRISPR-associated protein.

[0565] A “CRISPRCas” system refers to a system derived from CRISPR and Cas which can be used to silence or mutate a TCR and/or HLA gene, and/or an inhibitory molecule described herein (e.g., PD1, PD-L1, PD-L2, CTLA4, TIM3, CEACAM (e.g., CEACAM-1, CEACAM-3 and/or CEACAM-5), LAG3, VISTA, BTLA, TIGIT, LAIR1, CD160, 2B4, CD80, CD86, B7-H3 (CD276), B7-H4 (VTCN1), HVEM (TNFRSF14 or CD270), KIR, A2aR, MHC class I, MHC class II, GAL9, adenosine, and TGF beta), in a cell, e.g., T cell.

[0566] The CRISPR/Cas system, and uses thereof, are described, e.g., in paragraphs 651-658 of International Publication WO2015/142675, filed Mar. 13, 2015, which is incorporated by reference in its entirety.

TALEN to Inhibit TCR and/or HLA

[0567] TALEN” or “TALEN to HLA and/or TCR” or “TALEN to inhibit HLA and/or TCR” refers to a transcription activator-like effector nuclease, an artificial nuclease which can be used to edit the HLA and/or TCR gene, and/or an inhibitory molecule described herein (e.g., PD1, PD-L1, PD-L2, CTLA4, TIM3, CEACAM (e.g., CEACAM-1, CEACAM-3 and/or CEACAM-5), LAG3, VISTA, BTLA, TIGIT, LAIR1, CD160, 2B4, CD80, CD86, B7-H3 (CD276), B7-H4 (VTCN1), HVEM (TNFRSF14 or CD270), KIR, A2aR, MHC class I, MHC class II, GAL9, adenosine, and TGF beta), in a cell, e.g., T cell.

[0568] TALENs, and uses thereof, are described, e.g., in paragraphs 659-665 of International Publication WO2015/142675, filed Mar. 13, 2015, which is incorporated by reference in its entirety.

Zinc Finger Nuclease to Inhibit HLA and/or TCR

[0569] “ZFN” or “Zinc Finger Nuclease” or “ZFN to HLA and/or TCR” or “ZFN to inhibit HLA and/or TCR” refer to a zinc finger nuclease, an artificial nuclease which can be used to edit the HLA and/or TCR gene, and/or an inhibitory molecule described herein (e.g., PD1, PD-L1, PD-L2, CTLA4, TIM3, CEACAM (e.g., CEACAM-1, CEACAM-3 and/or CEACAM-5), LAG3, VISTA, BTLA, TIGIT, LAIR, CD160, 2B4, CD80, CD86, B7-H3 (CD276), B7-H4 (VTCN1), HVEM (TNFRSF14 or CD270), KIR, A2aR, MHC class I, MHC class II, GAL9, adenosine, and TGF beta), in a cell, e.g., T cell.

[0570] ZFNs, and uses thereof, are described, e.g., in paragraphs 666-671 of International Publication WO2015/142675, filed Mar. 13, 2015, which is incorporated by reference in its entirety.

### Telomerase Expression

[0571] While not wishing to be bound by any particular theory, in some embodiments, a therapeutic T cell has short term persistence in a patient, due to shortened telomeres in the T cell; accordingly, transfection with a telomerase gene can lengthen the telomeres of the T cell and improve persistence of the T cell in the patient. See Carl June, “Adoptive T cell therapy for cancer in the clinic”, Journal of Clinical Investigation, 117:1466-1476 (2007). Thus, in an embodiment, an immune effector cell, e.g., a T cell, ectopically expresses a telomerase subunit, e.g., the catalytic subunit of telomerase, e.g., TERT, e.g., hTERT. In some aspects, this disclosure provides a method of producing a CAR-expressing cell, comprising contacting a cell with a nucleic acid encoding a telomerase subunit, e.g., the catalytic subunit of telomerase, e.g., TERT, e.g., hTERT. The cell may be contacted with the nucleic acid before, simultaneous with, or after being contacted with a construct encoding a CAR.

[0572] In one aspect, the disclosure features a method of making a population of immune effector cells (e.g., T cells, NK cells). In an embodiment, the method comprises: providing a population of immune effector cells (e.g., T cells or NK cells), contacting the population of immune effector cells with a nucleic acid encoding a CAR, and contacting the population of immune effector cells with a nucleic acid encoding a telomerase subunit, e.g., hTERT, under conditions that allow for CAR and telomerase expression.

[0573] In an embodiment, the nucleic acid encoding the telomerase subunit is DNA. In an embodiment, the nucleic acid encoding the telomerase subunit comprises a promoter capable of driving expression of the telomerase subunit.

[0574] In an embodiment, hTERT has the amino acid sequence of GenBank Protein ID AAC51724.1 (Meyerson et al., “hEST2, the Putative Human Telomerase Catalytic Subunit Gene, Is Up-Regulated in Tumor Cells and during Immortalization” Cell Volume 90, Issue 4, 22 Aug. 1997, Pages 785-795) as follows:

(SEQ ID NO: 110)
[sequence omitted]

[0575] In an embodiment, the hTERT has a sequence at least 80%, 85%, 90%, 95%, 96\hat{ }, 97%, 98%, or 99% identical to the sequence of SEQ ID NO: 110. In an embodiment, the hTERT has a sequence of SEQ ID NO: 110. In an embodiment, the hTERT comprises a deletion (e.g., of no more than 5, 10, 15, 20, or 30 amino acids) at the N-terminus, the C-terminus, or both. In an embodiment, the hTERT comprises a transgenic amino acid sequence (e.g., of no more than 5, 10, 15, 20, or 30 amino acids) at the N-terminus, the C-terminus, or both.

[0576] In an embodiment, the hTERT is encoded by the nucleic acid sequence of GenBank Accession No. AF018167 (Meyerson et al., “hEST2, the Putative Human Telomerase Catalytic Subunit Gene, Is Up-Regulated in Tumor Cells and during Immortalization” Cell Volume 90, Issue 4, 22 Aug. 1997, Pages 785-795) as follows:

```
(SEQ ID NO: 111)
      1 caggcagcgt ggtcctgctg cgcacgtggg aagccctggc cccggccacc cccgcgatgc
    61 cgcgcgctcc ccgctgccga gccgtgcgct ccctgctgcg cagccactac cgcgaggtgc
  121 tgccgctggc cacgttcgtg cggcgcctgg ggccccaggg ctggcggctg gtgcagcgcg
  181 gggacccggc ggctttccgc gcgctggtgg cccagtgcct ggtgtgcgtg ccctgggacg
  241 cacggccgcc ccccgccgcc ccctccttcc gccaggtgtc ctgcctgaag gagctggtgg
  301 cccgagtgct gcagaggctg tgcgagcgcg gcgcgaagaa cgtgctggcc ttcggcttcg
  361 cgctgctgga cggggcccgc gggggccccc ccgaggcctt caccaccagc gtgcgcagct
  421 acctgcccaa cacggtgacc gacgcactgc gggggagcgg ggcgtggggg ctgctgttgc
  481 gccgcgtggg cgacgacgtg ctggttcacc tgctggcacg ctgcgcgctc tttgtgctgg
  541 tggctcccag ctgcgcctac caggtgtgcg ggccgccgct gtaccagctc ggcgctgcca
  601 ctcaggcccg gcccccgcca cacgctagtg gaccccgaag gcgtctggga tgcgaacggg
  661 cctggaacca tagcgtcagg gaggccgggg tccccctggg cctgccagcc ccgggtgcga
  721 ggaggcgcgg gggcagtgcc agccgaagtc tgccgttgcc caagaggccc aggcgtggcg
  781 ctgcccctga gccggagcgg acgcccgttg ggcaggggtc ctgggcccac ccgggcagga
  841 cgcgtggacc gagtgaccgt ggtttctgtg tggtgtcacc tgccagaccc gccgaagaag
  901 ccacctcttt ggagggtgcg ctctctggca cgcgccactc ccacccatcc gtgggccgcc
  961 agcaccacgc gggcccccca tccacatcgc ggccaccacg tccctgggac acgccttgtc
1021 ccccggtgta cgccgagacc aagcacttcc tctactcctc aggcgacaag gagcagctgc
1081 ggccctcctt cctactcagc tctctgaggc ccagcctgac tggcgctcgg aggctcgtgg
1141 agaccatctt tctgggttcc aggccctgga tgccagggac tccccgcagg ttgccccgcc
1201 tgccccagcg ctactggcaa atgcggcccc tatttctgga gctgcttggg aaccacgcgc
1261 agtgccccta cggggtgctc ctcaagacgc actgcccgct gcgagctgcg gtcaccccag
1321 cagccggtgt ctgtgcccgg gagaagcccc agggctctgt ggcggccccc gaggaggagg
1381 acacagaccc ccgtcgcctg gtgcagctgc tccgccagca cagcagcccc tggcaggtgt
1441 acggcttcgt gcgggcctgc ctgcgccggc tggtgccccc aggcctctgg ggctccaggc
1501 acaacgaacg ccgcttcctc aggaacacca agaagttcat ctccctgggg aagcatgcca
1561 agctctcgct gcaggagctg acgtggaaga tgagcgtgcg gggctgcgct tggctgcgca
1621 ggagcccagg ggttggctgt gttccggccg cagagcaccg tctgcgtgag gagatcctgg
1681 ccaagttcct gcactggctg atgagtgtgt acgtcgtcga gctgctcagg tctttatttt
1741 atgtcacgga gaccacgttt caaaagaaca ggctcttttt ctaccggaag agtgtctgga
1801 gcaagttgca aagcattgga atcagacagc acttgaagag ggtgcagctg cgggagctgt
1861 cggaagcaga ggtcaggcag catcgggaag ccaggcccgc cctgctgacg tccagactcc
1921 gcttcatccc caagcctgac gggctgcggc cgattgtgaa catggactac gtcgtgggag
1981 ccagaacgtt ccgcagagaa aagagggccg agcgtctcac ctcgagggtg aaggcactgt
2041 tcagcgtgct caactacgag cgggcgcggc gccccggcct cctgggcgcc tctgtgctgg
2101 gcctggacga tatccacagg gcctggcgca ccttcgtgct gcgtgtgcgg gcccaggacc
2161 cgccgcctga gctgtacttt gtcaaggtgg atgtgacggg cgcgtacgac accatccccc
2221 aggacaggct cacggaggtc atcgccagca tcatcaaacc ccagaacacg tactgcgtgc
2281 gtcggtatgc cgtggtccag aaggccgccc atgggcacgt ccgcaaggcc ttcaagagcc
2341 acgtctctac cttgacagac ctccagccgt acatgcgaca gttcgtggct cacctgcagg
2401 agaccagccc gctgagggat gccgtcgtca tcgagcagag ctcctccctg aatgaggcca
2461 gcagtggcct cttcgacgtc ttcctacgct tcatgtgcca ccacgccgtg cgcatcaggg
2521 gcaagtccta cgtccagtgc caggggatcc cgcagggctc catcctctcc acgctgctct
2581 gcagcctgtg ctacggcgac atggagaaca agctgtttgc ggggattcgg cgggacgggc
2641 tgctcctgcg tttggtggat gatttcttgt tggtgacacc tcacctcacc cacgcgaaaa
2701 ccttcctcag gaccctggtc cgaggtgtcc ctgagtatgg ctgcgtggtg aacttgcgga
2761 agacagtggt gaacttccct gtagaagacg aggccctggg tggcacggct tttgttcaga
2821 tgccggccca cggcctattc ccctggtgcg gcctgctgct ggatacccgg accctggagg
2881 tgcagagcga ctactccagc tatgcccgga cctccatcag agccagtctc accttcaacc
2941 gcggcttcaa ggctgggagg aacatgcgtc gcaaactctt tggggtcttg cggctgaagt
3001 gtcacagcct gtttctggat ttgcaggtga acagcctcca gacggtgtgc accaacatct
3061 acaagatcct cctgctacag gcgtacaggt ttcacgcatg tgtgctgcag ctcccatttc
3121 atcagcaagt ttggaagaac cccacatttt tcctgcgcgt catctctgac acggcctccc
3181 tctgctactc catcctgaaa gccaagaacg cagggatgtc gctgggggcc aagggcgccg
3241 ccggccctct gccctccgag gccgtgcagt ggctgtgcca ccaagcattc ctgctcaagc
3301 tgactcgaca ccgtgtcacc tacgtgccac tcctggggtc actcaggaca gcccagacgc
3361 agctgagtcg gaagctcccg gggacgacgc tgactgccct ggaggccgca gccaacccgg
3421 cactgccctc agacttcaag accatcctgg actgatggcc acccgcccac agccaggccg
3481 agagcagaca ccagcagccc tgtcacgccg ggctctacgt cccagggagg gaggggcggc
3541 ccacacccag gcccgcaccg ctgggagtct gaggcctgag tgagtgtttg gccgaggcct
3601 gcatgtccgg ctgaaggctg agtgtccggc tgaggcctga gcgagtgtcc agccaagggc
3661 tgagtgtcca gcacacctgc cgtcttcact tccccacagg ctggcgctcg gctccacccc
3721 agggccagct tttcctcacc aggagcccgg cttccactcc ccacatagga atagtccatc
3781 cccagattcg ccattgttca cccctcgccc tgccctcctt tgccttccac ccccaccatc
3841 caggtggaga ccctgagaag gaccctggga gctctgggaa tttggagtga ccaaaggtgt
3901 gccctgtaca caggcgagga ccctgcacct ggatgggggt ccctgtgggt caaattgggg
3961 ggaggtgctg tgggagtaaa atactgaata tatgagtttt tcagttttga aaaaaaaaaa
4021 aaaaaaa
```

[0577] In an embodiment, the hTERT is encoded by a nucleic acid having a sequence at least 80%, 85%, 90%, 95%, 96, 97%, 98%, or 99% identical to the sequence of SEQ ID NO: 111. In an embodiment, the hTERT is encoded by a nucleic acid of SEQ ID NO: 111.

### Activation and Expansion of Immune Effector Cells (e.g., T Cells)

[0578] Immune effector cells, such as T cells, may be activated and expanded generally using methods as described, for example, in U.S. Pat. Nos. 6,352,694; 6,534,055; 6,905,680; 6,692,964; 5,858,358; 6,887,466; 6,905,681; 7,144,575; 7,067,318; 7,172,869; 7,232,566; 7,175,843; 5,883,223; 6,905,874; 6,797,514; 6,867,041; and U.S. Patent Application Publication No. 20060121005.

[0579] Generally, a population of immune effector cells, e.g., T cells may be expanded by contact with a surface having attached thereto an agent that stimulates a CD3/TCR complex associated signal and a ligand that stimulates a costimulatory molecule on the surface of the immune effector cells, e.g., T cells. In particular, T cell populations may be stimulated as described herein, such as by contact with an anti-CD3 antibody, or antigen-binding fragment thereof, or an anti-CD2 antibody immobilized on a surface, or by contact with a protein kinase C activator (e.g., bryostatin) in conjunction with a calcium ionophore. For co-stimulation of an accessory molecule on the surface of the T cells, a ligand that binds the accessory molecule is used. For example, a population of T cells can be contacted with an anti-CD3 antibody and an anti-CD28 antibody, under conditions appropriate for stimulating proliferation of the T cells. To stimulate proliferation of either CD4+ T cells or CD8+ T cells, an anti-CD3 antibody and an 30 anti-CD28 antibody. Examples of an anti-CD28 antibody include 9.3, B-T3, XR-CD28 (Diaclone, Besancon, France) can be used as can other methods commonly known in the art (Berg et al., Transplant Proc. 30(8):3975-3977, 1998; Haanen et al., J. Exp. Med. 190(9):13191328, 1999; Garland et al., J. Immunol Meth. 227(1-2):53-63, 1999).

[0580] In certain aspects, the primary stimulatory signal and the costimulatory signal for the T cell may be provided by different protocols. For example, the agents providing each signal may be in solution or coupled to a surface. When coupled to a surface, the agents may be coupled to the same surface (i.e., in “cis” formation) or to separate surfaces (i.e., in “trans” formation). Alternatively, one agent may be coupled to a surface and the other agent in solution. In one aspect, the agent providing the costimulatory signal is bound to a cell surface and the agent providing the primary activation signal is in solution or coupled to a surface. In certain aspects, both agents can be in solution. In one aspect, the agents may be in soluble form, and then cross-linked to a surface, such as a cell expressing Fc receptors or an antibody or other binding agent which will bind to the agents. In this regard, see for example, U.S. Patent Application Publication Nos. 20040101519 and 20060034810 for artificial antigen presenting cells (aAPCs) that are contemplated for use in activating and expanding T cells in the present disclosure.

[0581] In one aspect, the two agents are immobilized on beads, either on the same bead, i.e., “cis,” or to separate beads, i.e., “trans.” By way of example, the agent providing the primary activation signal is an anti-CD3 antibody or an antigen-binding fragment thereof and the agent providing the costimulatory signal is an anti-CD28 antibody or antigen-binding fragment thereof; and both agents are co-immobilized to the same bead in equivalent molecular amounts. In one aspect, a 1:1 ratio of each antibody bound to the beads for CD4+ T cell expansion and T cell growth is used. In certain aspects of the present disclosure, a ratio of anti CD3:CD28 antibodies bound to the beads is used such that an increase in T cell expansion is observed as compared to the expansion observed using a ratio of 1:1. In one particular aspect an increase of from about 1 to about 3 fold is observed as compared to the expansion observed using a ratio of 1:1. In one aspect, the ratio of CD3:CD28 antibody bound to the beads ranges from 100:1 to 1:100 and all integer values there between. In one aspect of the present disclosure, more anti-CD28 antibody is bound to the particles than anti-CD3 antibody, i.e., the ratio of CD3:CD28 is less than one. In certain aspects of the invention, the ratio of anti CD28 antibody to anti CD3 antibody bound to the beads is greater than 2:1. In one particular aspect, a 1:100 CD3:CD28 ratio of antibody bound to beads is used. In one aspect, a 1:75 CD3:CD28 ratio of antibody bound to beads is used. In a further aspect, a 1:50 CD3:CD28 ratio of antibody bound to beads is used. In one aspect, a 1:30 CD3:CD28 ratio of antibody bound to beads is used. In one preferred aspect, a 1:10 CD3:CD28 ratio of antibody bound to beads is used. In one aspect, a 1:3 CD3:CD28 ratio of antibody bound to the beads is used. In yet one aspect, a 3:1 CD3:CD28 ratio of antibody bound to the beads is used.

[0582] Ratios of particles to cells from 1:500 to 500:1 and any integer values in between may be used to stimulate T cells or other target cells. As those of ordinary skill in the art can readily appreciate, the ratio of particles to cells may depend on particle size relative to the target cell. For example, small sized beads could only bind a few cells, while larger beads could bind many. In certain aspects the ratio of cells to particles ranges from 1:100 to 100:1 and any integer values in-between and in further aspects the ratio comprises 1:9 to 9:1 and any integer values in between, can also be used to stimulate T cells. The ratio of anti-CD3- and anti-CD28-coupled particles to T cells that result in T cell stimulation can vary as noted above, however certain preferred values include 1:100, 1:50, 1:40, 1:30, 1:20, 1:10, 1:9, 1:8, 1:7, 1:6, 1:5, 1:4, 1:3, 1:2, 1:1, 2:1, 3:1, 4:1, 5:1, 6:1, 7:1, 8:1, 9:1, 10:1, and 15:1 with one preferred ratio being at least 1:1 particles per T cell. In one aspect, a ratio of particles to cells of 1:1 or less is used. In one particular aspect, a preferred particle: cell ratio is 1:5. In further aspects, the ratio of particles to cells can be varied depending on the day of stimulation. For example, in one aspect, the ratio of particles to cells is from 1:1 to 10:1 on the first day and additional particles are added to the cells every day or every other day thereafter for up to 10 days, at final ratios of from 1:1 to 1:10 (based on cell counts on the day of addition). In one particular aspect, the ratio of particles to cells is 1:1 on the first day of stimulation and adjusted to 1:5 on the third and fifth days of stimulation. In one aspect, particles are added on a daily or every other day basis to a final ratio of 1:1 on the first day, and 1:5 on the third and fifth days of stimulation. In one aspect, the ratio of particles to cells is 2:1 on the first day of stimulation and adjusted to 1:10 on the third and fifth days of stimulation. In one aspect, particles are added on a daily or every other day basis to a final ratio of 1:1 on the first day, and 1:10 on the third and fifth days of stimulation. One of skill in the art will appreciate that a variety of other ratios may be suitable for use in the present disclosure. In particular, ratios will vary depending on particle size and on cell size and type. In one aspect, the most typical ratios for use are in the neighborhood of 1:1, 2:1 and 3:1 on the first day.

[0583] In further aspects of the present disclosure, the cells, such as T cells, are combined with agent-coated beads, the beads and the cells are subsequently separated, and then the cells are cultured. In an alternative aspect, prior to culture, the agent-coated beads and cells are not separated but are cultured together. In a further aspect, the beads and cells are first concentrated by application of a force, such as a magnetic force, resulting in increased ligation of cell surface markers, thereby inducing cell stimulation.

[0584] By way of example, cell surface proteins may be ligated by allowing paramagnetic beads to which anti-CD3 and anti-CD28 are attached (3×28 beads) to contact the T cells. In one aspect the cells (for example, 10⁴ to 10⁹ T cells) and beads (for example, DYNABEADS® M-450 CD3/CD28 T paramagnetic beads at a ratio of 1:1) are combined in a buffer, for example PBS (without divalent cations such as, calcium and magnesium). Again, those of ordinary skill in the art can readily appreciate any cell concentration may be used. For example, the target cell may be very rare in the sample and comprise only 0.01% of the sample or the entire sample (i.e., 100%) may comprise the target cell of interest. Accordingly, any cell number is within the context of the present disclosure. In certain aspects, it may be desirable to significantly decrease the volume in which particles and cells are mixed together (i.e., increase the concentration of cells), to ensure maximum contact of cells and particles. For example, in one aspect, a concentration of about 2 billion cells/ml is used. In one aspect, greater than 100 million cells/ml is used. In a further aspect, a concentration of cells of 10, 15, 20, 25, 30, 35, 40, 45, or 50 million cells/ml is used. In yet one aspect, a concentration of cells from 75, 80, 85, 90, 95, or 100 million cells/ml is used. In further aspects, concentrations of 125 or 150 million cells/ml can be used. Using high concentrations can result in increased cell yield, cell activation, and cell expansion. Further, use of high cell concentrations allows more efficient capture of cells that may weakly express target antigens of interest, such as CD28-negative T cells. Such populations of cells may have therapeutic value and would be desirable to obtain in certain aspects. For example, using high concentration of cells allows more efficient selection of CD8+ T cells that normally have weaker CD28 expression.

[0585] In one embodiment, cells transduced with a nucleic acid encoding a CAR, e.g., a CAR described herein, are expanded, e.g., by a method described herein. In one embodiment, the cells are expanded in culture for a period of several hours (e.g., about 2, 3, 4, 5, 6, 7, 8, 9, 10, 15, 18, 21 hours) to about 14 days (e.g., 1, 2, 3, 4, 5, 6, 7, 8, 9, 10, 11, 12, 13 or 14 days). In one embodiment, the cells are expanded for a period of 4 to 9 days. In one embodiment, the cells are expanded for a period of 8 days or less, e.g., 7, 6 or 5 days. In one embodiment, the cells, e.g., a CAR-expressing cell described herein, are expanded in culture for 5 days, and the resulting cells are more potent than the same cells expanded in culture for 9 days under the same culture conditions. Potency can be defined, e.g., by various T cell functions, e.g. proliferation, target cell killing, cytokine production, activation, migration, or combinations thereof. In one embodiment, the cells, e.g., a CAR-expressing cell described herein, expanded for 5 days show at least a one, two, three or four fold increase in cells doublings upon antigen stimulation as compared to the same cells expanded in culture for 9 days under the same culture conditions. In one embodiment, the cells, e.g., the cells expressing a CAR described herein, are expanded in culture for 5 days, and the resulting cells exhibit higher proinflammatory cytokine production, e.g., IFN-γ and/or GM-CSF levels, as compared to the same cells expanded in culture for 9 days under the same culture conditions. In one embodiment, the cells, e.g., a CAR-expressing cell described herein, expanded for 5 days show at least a one, two, three, four, five, tenfold or more increase in pg/ml of proinflammatory cytokine production, e.g., IFN-γ and/or GM-CSF levels, as compared to the same cells expanded in culture for 9 days under the same culture conditions.

[0586] In one aspect of the present disclosure, the mixture may be cultured for several hours (about 3 hours) to about 14 days or any hourly integer value in between. In one aspect, the mixture may be cultured for 21 days. In one aspect of the invention the beads and the T cells are cultured together for about eight days. In one aspect, the beads and T cells are cultured together for 2-3 days. Several cycles of stimulation may also be desired such that culture time of T cells can be 60 days or more. Conditions appropriate for T cell culture include an appropriate media (e.g., Minimal Essential Media or RPMI Media 1640 or, X-vivo 15, (Lonza)) that may contain factors necessary for proliferation and viability, including serum (e.g., fetal bovine or human serum), interleukin-2 (IL-2), insulin, IFN-γ, IL-4, IL-7, GM-CSF, IL-10, IL-12, IL-15, TGFβ, and TNF-α or any other additives for the growth of cells known to the skilled artisan. Other additives for the growth of cells include, but are not limited to, surfactant, plasmanate, and reducing agents such as N-acetyl-cysteine and 2-mercaptoethanol. Media can include RPMI 1640, AIM-V, DMEM, MEM, α-MEM, F-12, X-Vivo 15, and X-Vivo 20, Optimizer, with added amino acids, sodium pyruvate, and vitamins, either serum-free or supplemented with an appropriate amount of serum (or plasma) or a defined set of hormones, and/or an amount of cytokine(s) sufficient for the growth and expansion of T cells. Antibiotics, e.g., penicillin and streptomycin, are included only in experimental cultures, not in cultures of cells that are to be infused into a subject. The target cells are maintained under conditions necessary to support growth, for example, an appropriate temperature (e.g., 37° C.) and atmosphere (e.g., air plus 5% CO₂).

[0587] In one embodiment, the cells are expanded in an appropriate media (e.g., media described herein) that includes one or more interleukin that result in at least a 200-fold (e.g., 200-fold, 250-fold, 300-fold, 350-fold) increase in cells over a 14 day expansion period, e.g., as measured by a method described herein such as flow cytometry. In one embodiment, the cells are expanded in the presence IL-15 and/or IL-7 (e.g., IL-15 and IL-7).

[0588] In embodiments, methods described herein, e.g., CAR-expressing cell manufacturing methods, comprise removing T regulatory cells, e.g., CD25+ T cells, from a cell population, e.g., using an anti-CD25 antibody, or fragment thereof, or a CD25-binding ligand, IL-2. Methods of removing T regulatory cells, e.g., CD25+ T cells, from a cell population are described herein. In embodiments, the methods, e.g., manufacturing methods, further comprise contacting a cell population (e.g., a cell population in which T regulatory cells, such as CD25+ T cells, have been depleted; or a cell population that has previously contacted an anti-CD25 antibody, fragment thereof, or CD25-binding ligand) with IL-15 and/or IL-7. For example, the cell population (e.g., that has previously contacted an anti-CD25 antibody, fragment thereof, or CD25-binding ligand) is expanded in the presence of IL-15 and/or IL-7.

[0589] In some embodiments a CAR-expressing cell described herein is contacted with a composition comprising a interleukin-15 (IL-15) polypeptide, a interleukin-15 receptor alpha (IL-15Ra) polypeptide, or a combination of both a IL-15 polypeptide and a IL-15Ra polypeptide e.g., hetIL-15, during the manufacturing of the CAR-expressing cell, e.g., ex vivo.

[0590] In embodiments, a CAR-expressing cell described herein is contacted with a composition comprising a IL-15 polypeptide during the manufacturing of the CAR-expressing cell, e.g., ex vivo. In embodiments, a CAR-expressing cell described herein is contacted with a composition comprising a combination of both a IL-15 polypeptide and a IL-15 Ra polypeptide during the manufacturing of the CAR-expressing cell, e.g., ex vivo. In embodiments, a CAR-expressing cell described herein is contacted with a composition comprising hetIL-15 during the manufacturing of the CAR-expressing cell, e.g., ex vivo.

[0591] In one embodiment the CAR-expressing cell described herein is contacted with a composition comprising hetIL-15 during ex vivo expansion. In an embodiment, the CAR-expressing cell described herein is contacted with a composition comprising an IL-15 polypeptide during ex vivo expansion. In an embodiment, the CAR-expressing cell described herein is contacted with a composition comprising both an IL-15 polypeptide and an IL-15Ra polypeptide during ex vivo expansion. In one embodiment the contacting results in the survival and proliferation of a lymphocyte subpopulation, e.g., CD8+ T cells.

[0592] In one embodiment, the cells are cultured (e.g., expanded, simulated, and/or transduced) in media comprising serum. The serum may be, e.g., human AB serum (hAB). In some embodiments, the hAB serum is present at about 2%, about 5%, about 2-3%, about 3-4%, about 4-5%, or about 2-5%. 2% and 5% serum are each suitable levels that allow for many fold expansion of T cells. Furthermore, as shown in Smith et al., “Ex vivo expansion of human T cells for adoptive immunotherapy using the novel Xeno-free CTS Immune Cell Serum Replacement” Clinical & Translational Immunology (2015) 4, e31; doi:10.1038/cti.2014.31, medium containing 2% human AB serum is suitable for ex vivo expansion of T cells.

[0593] T cells that have been exposed to varied stimulation times may exhibit different characteristics. For example, typical blood or apheresed peripheral blood mononuclear cell products have a helper T cell population (TH, CD4+) that is greater than the cytotoxic or suppressor T cell population (TC, CD8+). Ex vivo expansion of T cells by stimulating CD3 and CD28 receptors produces a population of T cells that prior to about days 8-9 consists predominately of TH cells, while after about days 8-9, the population of T cells comprises an increasingly greater population of TC cells. Accordingly, depending on the purpose of treatment, infusing a subject with a T cell population comprising predominately of TH cells may be advantageous. Similarly, if an antigen-specific subset of TC cells has been isolated it may be beneficial to expand this subset to a greater degree.

[0594] Further, in addition to CD4 and CD8 markers, other phenotypic markers vary significantly, but in large part, reproducibly during the course of the cell expansion process. Thus, such reproducibility enables the ability to tailor an activated T cell product for specific purposes.

[0595] In some embodiments, cells transduced with a nucleic acid encoding a CAR, e.g., a CAR described herein, can be selected for administration based upon, e.g., protein expression levels of one or more of CCL20, GM-CSF, IFNγ, IL-10, IL-13, IL-17a, IL-2, IL-21, IL-4, IL-5, IL-6, IL-9, TNFα and/or combinations thereof. In some embodiments, cells transduced with a nucleic acid encoding a CAR, e.g., a CAR described herein, can be selected for administration based upon, e.g., protein expression levels of CCL20, IL-17a, IL-6 and combinations thereof.

[0596] Once a TA CAR is constructed, various assays can be used to evaluate the activity of the molecule, such as but not limited to, the ability to expand T cells following antigen stimulation, sustain T cell expansion in the absence of re-stimulation, and anti-cancer activities in appropriate in vitro and animal models. Assays to evaluate the effects of a TA CAR or a cell expressing both a BCA CAR and a TA CAR (e.g., a cell of the invention) are described in further detail in paragraphs 695-703 of International Publication WO2015/142675, filed Mar. 13, 2015, which is incorporated by reference in its entirety.

[0597] Once a BCA CAR is constructed, various assays can be used to evaluate the activity of the molecule, such as but not limited to, the ability to deplete B cells (or other preferred populations) in appropriate in vitro and animal models, and the ability to persist upon exposure to B cells. Assays to evaluate the effects of a BCA CAR or a cell expressing both a BCA CAR and a TA CAR (e.g., a cell of the invention) are described in further detail below.

[0598] For example, the cytotoxicity assay described above can be modified to evaluate the cytotoxic activity of a BCA CAR-expressing cell (e.g., a cell expressing both a BCA CAR and a TA CAR) in vitro. Cells of the invention (e.g., a cell expressing both a BCA CAR and a TA CAR) can be mixed with target cells, e.g., cells expressing the B cell antigen targeted by the BCA CAR, at varying ratios of effector to target (E:T). After sufficient incubation to allow cell-mediated cytolysis the supernatant from each ratio sample is harvested and then measured for released 51Cr. To monitor cell-mediated persistence or proliferation, the cells of the invention can be monitored by, for example, flow cytometry.

[0599] Furthermore, animal models similar to those described above can be administered a cell of the invention (e.g., a cell expressing both a BCA CAR and a TA CAR), to evaluate the ability of the cell, including its ability to persist and/or proliferate to a greater degree or for a longer time than the same cell which does not express the BCA CAR.

### Therapeutic Application

[0600] Some methods for treating a disease associated with the expression of a tumor antigen with CAR therapy have had variable success, in part due to stimulation of the immune response of the subject to the CAR-expressing cells which can result in subsequent rejection of the CAR-expressing cells, and/or adverse response to the CAR-expressing cells.

[0601] In one aspect, the present disclosure provides methods for treating a disease associated with expression of a tumor antigen, e.g., a cancer, described herein, by administering a cell of the invention (e.g., a cell expressing both a BCA CAR and a TA CAR). In some embodiments, in some embodiments, the therapy with the cell of the invention is preceded by, or accompanied by, lymphodepleting therapy. In other embodiments, the therapy with the cell of the invention is not preceded by, or accompanied by, lymphdepleting therapy, e.g., the subject is not administered lymphodepleting therapy 1 year, 9 months, 6, months, 3 months, 2 months, 1 month, 4 weeks, 3 weeks, 2 weeks, 1 week, 6 days, 5 days, 4 days, 3 days, 2 days, 1 day, or fewer months, weeks or days than any of the foregoing, prior to administration of the cell of the invention. Suitable examples of lymphodepleting agents include, but are not limited to, fludarabine and cyclophosphamide, and are further described in the section entitled “Combination Therapies”.

[0602] In another aspect, the present disclosure provides methods for treating a cancer, e.g., a solid tumor described herein, by administering an immune effector cell comprising (e.g., engineered to express) a TA CAR, e.g., a mesothelin CAR (as described herein) or EGFRvIII CAR (as described herein), and comprising (e.g., engineered to express) a BCA CAR, e.g., a CD19 CAR (as described herein) or a BCMA CAR (as described herein), as described herein. In embodiments, the cell therapy may be administered with an anti-cancer therapeutic agent described herein. In one embodiment, the anti-cancer therapeutic agent is a chemotherapeutic agent, e.g., as described in the section titled “Combination Therapies”. In another embodiment, the anti-cancer therapeutic agent is a therapeutic agent which treats a solid tumor.

[0603] In another aspect, the present disclosure provides methods for treating a cancer, e.g., a myeloid tumor described herein, by administering an immune effector cell comprising (e.g., engineered to express) a TA CAR, e.g., a CD123 CAR (as described herein), a CD33 CAR (as described herein) or CLL-1 CAR (as described herein), and comprising (e.g., engineered to express) a BCA CAR, e.g., a CD19 CAR (as described herein) or a BCMA CAR (as described herein), as described herein. In embodiments, the cell therapy may be administered with an anti-cancer therapeutic agent described herein. In one embodiment, the anti-cancer therapeutic agent is a chemotherapeutic agent, e.g., as described in the section titled “Combination Therapies”. In another embodiment, the anti-cancer therapeutic agent is a therapeutic agent which treats a myeloid tumor.

[0604] Administered “in combination”, as used herein, means that two (or more) different treatments are delivered to the subject during the course of the subject's affliction with the disorder, e.g., the two or more treatments are delivered after the subject has been diagnosed with the disorder and before the disorder has been cured or eliminated or treatment has ceased for other reasons. In some embodiments, the delivery of one treatment is still occurring when the delivery of the second begins, so that there is overlap in terms of administration. This is sometimes referred to herein as “simultaneous” or “concurrent delivery”. In other embodiments, the delivery of one treatment ends before the delivery of the other treatment begins. In some embodiments of either case, the treatment is more effective because of combined administration. For example, the second treatment is more effective, e.g., an equivalent effect is seen with less of the second treatment, or the second treatment reduces symptoms to a greater extent, than would be seen if the second treatment were administered in the absence of the first treatment, or the analogous situation is seen with the first treatment. In some embodiments, delivery is such that the reduction in a symptom, or other parameter related to the disorder is greater than what would be observed with one treatment delivered in the absence of the other. The effect of the two treatments can be partially additive, wholly additive, or greater than additive. The delivery can be such that an effect of the first treatment delivered is still detectable when the second is delivered.

### Anti-Cancer Therapy

[0605] In one aspect, the present disclosure provides methods of treating a disease, e.g., cancer, by providing to the subject in need thereof a cell of the invention, e.g., an immune effector cell (e.g., T cells, NK cells) that comprises (e.g., is engineered to express) a TA CAR described herein, and a BCA CAR described herein, wherein the diseased cells, e.g., cancer cells, express a tumor antigen, e.g., a tumor antigen targeted by the TA CAR.

[0606] Without wishing to be bound by any particular theory, the anti-tumor immunity response elicited by the CAR-expressing cell of the invention may be an active or a passive immune response, or alternatively may be due to a direct vs indirect immune response. In one aspect, the CAR-expressing cell of the invention exhibits specific proinflammatory cytokine secretion and potent cytolytic activity in response to human cancer cells expressing the tumor antigen described herein, resist inhibition by soluble tumor antigen as described herein, mediate bystander killing and mediate regression of an established human tumor. For example, antigen-less tumor cells within a heterogeneous field of antigen-positive tumor cells may be susceptible to indirect destruction by the CAR-expressing cell of the invention that has previously reacted against the adjacent antigen-positive tumor cells.

[0607] In one embodiment, the present disclosure provides methods for inhibiting the proliferation or reducing the population of cancer cells expressing a tumor antigen described herein, the methods comprising contacting a tumor antigen described herein-expressing cancer cell population with a cell of the invention, e.g., an immune effector cell (e.g., T cells, NK cells) that comprises (e.g., is engineered to express) a TA CAR described herein, and a BCA CAR described herein, that binds to a tumor antigen described herein-expressing cell. In certain embodiments, a cell of the invention, e.g., an immune effector cell (e.g., T cells, NK cells) that comprises (e.g., is engineered to express) a TA CAR described herein, and a BCA CAR described herein, reduces the quantity, number, amount or percentage of cells and/or cancer cells by at least 25%, at least 30%, at least 40%, at least 50%, at least 65%, at least 75%, at least 85%, at least 95%, or at least 99% in a subject with or animal model of a cancer associated with the expression of a tumor antigen as described herein, relative to a negative control. In one aspect, the subject is a human.

[0608] The present disclosure also provides methods for preventing, treating and/or managing a disease associated with a tumor antigen described herein. These methods comprise administering to a subject in need thereof a cell of the invention, e.g., an immune effector cell (e.g., T cells, NK cells) that comprises (e.g., is engineered to express) a TA CAR described herein, and a BCA CAR described herein, that binds to a tumor antigen-expressing cell.

[0609] The present disclosure provides methods for preventing relapse of a cancer associated with a tumor antigen as described herein, the methods comprising administering to a subject in need thereof a cell of the invention, e.g., an immune effector cell (e.g., T cells, NK cells) that comprises (e.g., is engineered to express) a TA CAR described herein, and a BCA CAR described herein, that binds to a tumor antigen-expressing cell. Without being bound by theory, it is believed that expression of a BCA CAR on the cell of the invention allows the cell to persist longer in vivo, or proliferate to a greater degree in vivo, than an identical cell which does not express the BCA CAR, thereby allowing for the generation of persisting populations of cells expressing a TA CAR, which may effectively treat a relapse without another administration of the cells for the invention.

[0610] In one aspect, the methods comprise administering to the subject in need thereof an effective amount of a CAR-expressing cell described herein (e.g., a cell comprising (e.g., engineered to express) both a TA CAR and a BCA CAR) that binds to a tumor antigen-expressing cell in combination with an effective amount of another therapy, e.g., an administration of a therapy as described in the section titled “Combination Therapies.”

[0611] In embodiments, administering of the cells of the invention (e.g., a cell comprising (e.g., engineered to express) both a TA CAR and a BCA CAR) results in partial or complete elimination of said tumor cells (e.g., targeted by the TA CAR) and, thereafter, continue to persist in said subject at a level greater than, or for a length of time longer than, otherwise identical cells that lack the BCA CAR.

[0612] A cell of the invention (e.g., a cell comprising (e.g., engineered to express) both a TA CAR and a BCA CAR) can stably express a TA CAR molecule that targets a tumor antigen and/or a BCA CAR molecule. Alternatively, a cell of the invention (e.g., a cell comprising (e.g., engineered to express) both a TA CAR and a BCA CAR) can transiently express a TA CAR molecule that targets a tumor antigen and/or a BCA CAR molecule. In embodiments where the TA CAR or the BCA CAR, or both the TA CAR and the BCA CAR are transiently expressed, multiple sequential infusions (e.g., 2, 3, 4, 5, 6, 7, 8, 9 or 10 infusions) of the cell of the invention may be required to effectively treat or manage the disease associated with expression of the tumor antigen. In some embodiments, stable expression of both the BCA CAR and the TA CAR may be preferred for long-term anti-tumor activity. In various aspects, the cell of the invention, or their progeny, persist in the subject for at least four months, five months, six months, seven months, eight months, nine months, ten months, eleven months, twelve months, thirteen months, fourteen month, fifteen months, sixteen months, seventeen months, eighteen months, nineteen months, twenty months, twenty-one months, twenty-two months, twenty-three months, two years, three years, four years, or five years after administration of the cell. In embodiments, such persistence is substantially longer than the persistence of an otherwise identical cell which does not express a BCA CAR, e.g., is at least four months, five months, six months, seven months, eight months, nine months, ten months, eleven months, twelve months, thirteen months, fourteen month, fifteen months, sixteen months, seventeen months, eighteen months, nineteen months, twenty months, twenty-one months, twenty-two months, twenty-three months, two years, three years, four years, or five years longer than the persistence of an otherwise identical molecule which does not express a BCA CAR.

[0613] In one aspect, the cell of the invention may be a type of vaccine for ex vivo immunization and/or in vivo therapy in a mammal. In one aspect, the mammal is a human.

[0614] With respect to ex vivo immunization, at least one of the following occurs in vitro prior to administering the cell into a mammal: i) expansion of the cells, ii) introducing a nucleic acid encoding a CAR to the cells or iii) cryopreservation of the cells.

[0615] Ex vivo procedures are well known in the art and are discussed more fully below. Briefly, cells are isolated from a mammal (e.g., a human) and genetically modified (i.e., transduced or transfected in vitro) with a vector expressing a CAR disclosed herein. The CAR-modified cell can be administered to a mammalian recipient to provide a therapeutic benefit. The mammalian recipient may be a human and the CAR-modified cell can be autologous with respect to the recipient. Alternatively, the cells can be allogeneic, syngeneic or xenogeneic with respect to the recipient.

[0616] The procedure for ex vivo expansion of hematopoietic stem and progenitor cells is described in U.S. Pat. No. 5,199,942, incorporated herein by reference, can be applied to the cells of the present disclosure. Other suitable methods are known in the art, therefore the present disclosure is not limited to any particular method of ex vivo expansion of the cells. Briefly, ex vivo culture and expansion of immune effector cells (e.g., T cells, NK cells) comprises: (1) collecting CD34+ hematopoietic stem and progenitor cells from a mammal from peripheral blood harvest or bone marrow explants; and (2) expanding such cells ex vivo. In addition to the cellular growth factors described in U.S. Pat. No. 5,199,942, other factors such as flt3-L, IL-1, IL-3 and c-kit ligand, can be used for culturing and expansion of the cells.

[0617] Exemplary CAR-expressing cells that target a tumor antigen, e.g., expressing a solid tumor CAR or a myeloid tumor CAR, are further described herein. Exemplary cells of the invention express a CAR molecule that binds to a tumor antigen described herein, e.g., a solid tumor associated antigen, a myeloid tumor antigen, or a hematological tumor not of B-Cell origin, and also express a BCA CAR molecule that binds a B-Cell antigen described herein.

[0618] In one embodiment, the cell of the invention comprises (e.g., is engineered to express) a TA CAR targeting mesothelin, as described herein, and a BCA CAR targeting CD19, as described herein. In one embodiment, the cell of the invention comprises (e.g., is engineered to express) a TA CAR targeting mesothelin, as described herein, and a BCA CAR targeting BCMA, as described herein. In one embodiment, the cell of the invention comprises (e.g., is engineered to express) a TA CAR targeting EGFRvIII, as described herein, and a BCA CAR targeting CD19, as described herein. In one embodiment, the cell of the invention comprises (e.g., is engineered to express) a TA CAR targeting EGFRvII, as described herein, and a BCA CAR targeting BCMA, as described herein. In one embodiment, the cell of the invention comprises (e.g., is engineered to express) a TA CAR targeting CD123, as described herein, and a BCA CAR targeting CD19, as described herein. In one embodiment, the cell of the invention comprises (e.g., is engineered to express) a TA CAR targeting CD123, as described herein, and a BCA CAR targeting BCMA, as described herein. In one embodiment, the cell of the invention comprises (e.g., is engineered to express) a TA CAR targeting CD33, as described herein, and a BCA CAR targeting CD19, as described herein. In one embodiment, the cell of the invention comprises (e.g., is engineered to express) a TA CAR targeting CD33, as described herein, and a BCA CAR targeting BCMA, as described herein. In one embodiment, the cell of the invention comprises (e.g., is engineered to express) a TA CAR targeting CLL-1, as described herein, and a BCA CAR targeting CD19, as described herein. In one embodiment, the cell of the invention comprises (e.g., is engineered to express) a TA CAR targeting CLL-1, as described herein, and a BCA CAR targeting BCMA, as described herein. Other embodiments are described herein as well.

Diseases Associated with Expression of a Tumor Antigen

[0619] The methods described herein relate to treating diseases associated with expression of a tumor antigen. A disease associated with expression of a tumor antigen may be a cancer or other proliferative disease, such as an atypical and/or non-classical cancer, malignancy, or precancerous condition, e.g., a hyperplasia, myelodysplasia, a myelodypslastic syndrome, or a preleukemia, associated with expression of the tumor antigen. Non-cancer related indications associated with expression of a tumor antigen as described herein include, but are not limited to, e.g., autoimmune disease (e.g., lupus), inflammatory disorders (e.g., allergy and asthma), and transplantation.

[0620] Methods described herein can be used to treat any of the following cancers:

[0621] Digestive/gastrointestinal cancers such as anal cancer; bile duct cancer; extrahepatic bile duct cancer; appendix cancer; carcinoid tumor, gastrointestinal cancer; colon cancer; colorectal cancer including childhood colorectal cancer; esophageal cancer including childhood esophageal cancer; gallbladder cancer; gastric (stomach) cancer including childhood gastric (stomach) cancer; hepatocellular (liver) cancer including adult (primary) hepatocellular (liver) cancer and childhood (primary) hepatocellular (liver) cancer; pancreatic cancer including childhood pancreatic cancer; sarcoma, rhabdomyosarcoma; islet cell pancreatic cancer; rectal cancer; and small intestine cancer;

[0622] Endocrine cancers such as islet cell carcinoma (endocrine pancreas); adrenocortical carcinoma including childhood adrenocortical carcinoma; gastrointestinal carcinoid tumor; parathyroid cancer; pheochromocytoma; pituitary tumor; thyroid cancer including childhood thyroid cancer; childhood multiple endocrine neoplasia syndrome; and childhood carcinoid tumor;

[0623] Eye cancers such as intraocular melanoma; and retinoblastoma;

[0624] Musculoskeletal cancers such as Ewing's family of tumors; osteosarcoma/malignant fibrous histiocytoma of the bone; childhood rhabdomyosarcoma; soft tissue sarcoma including adult and childhood soft tissue sarcoma; clear cell sarcoma of tendon sheaths; and uterine sarcoma;

[0625] Breast cancer such as breast cancer including childhood and male breast cancer and pregnancy;

[0626] Neurologic cancers such as childhood brain stem glioma; brain tumor; childhood cerebellar astrocytoma; childhood cerebral astrocytoma/malignant glioma; childhood ependymoma; childhood medulloblastoma; childhood pineal and supratentorial primitive neuroectodermal tumors; childhood visual pathway and hypothalamic glioma; other childhood brain cancers; adrenocortical carcinoma; central nervous system lymphoma, primary; childhood cerebellar astrocytoma; neuroblastoma; craniopharyngioma; spinal cord tumors; central nervous system atypical teratoid/rhabdoid tumor; central nervous system embryonal tumors; and childhood supratentorial primitive neuroectodermal tumors and pituitary tumor;

[0627] Genitourinary cancers such as bladder cancer including childhood bladder cancer; renal cell (kidney) cancer; ovarian cancer including childhood ovarian cancer; ovarian epithelial cancer; ovarian low malignant potential tumor; penile cancer; prostate cancer; renal cell cancer including childhood renal cell cancer; renal pelvis and ureter, transitional cell cancer; testicular cancer; urethral cancer; vaginal cancer; vulvar cancer; cervical cancer; Wilms tumor and other childhood kidney tumors; endometrial cancer; and gestational trophoblastic tumor;

[0628] Germ cell cancers such as childhood extracranial germ cell tumor; extragonadal germ cell tumor; ovarian germ cell tumor; and testicular cancer;

[0629] Head and neck cancers such as lip and oral cavity cancer; oral cancer including childhood oral cancer; hypopharyngeal cancer; laryngeal cancer including childhood laryngeal cancer; metastatic squamous neck cancer with occult primary; mouth cancer; nasal cavity and paranasal sinus cancer; nasopharyngeal cancer including childhood nasopharyngeal cancer; oropharyngeal cancer; parathyroid cancer; pharyngeal cancer; salivary gland cancer including childhood salivary gland cancer; throat cancer; and thyroid cancer;

[0630] Hematological cancers such as a leukemia or a lymphoma; including, but not limited to, e.g., one or more acute leukemias including but not limited to, e.g., B-cell acute Lymphoid Leukemia (“BALL”), T-cell acute Lymphoid Leukemia (“TALL”), acute lymphoid leukemia (ALL); one or more chronic leukemias including but not limited to, e.g., chronic myelogenous leukemia (CML), Chronic Lymphoid Leukemia (CLL). Additional hematological cancers include, but are not limited to, e.g., B cell prolymphocytic leukemia, blastic plasmacytoid dendritic cell neoplasm, Burkitt's lymphoma, diffuse large B cell lymphoma, Follicular lymphoma, Hairy cell leukemia, small cell- or a large cell-follicular lymphoma, malignant lymphoproliferative conditions, MALT lymphoma, mantle cell lymphoma, Marginal zone lymphoma, multiple myeloma, myelodysplasia and myelodysplastic syndrome, non-Hodgkin's lymphoma, plasmablastic lymphoma, plasmacytoid dendritic cell neoplasm, Waldenstrom macroglobulinemia, and “preleukemia” which are a diverse collection of hematological conditions united by ineffective production (or dysplasia) of myeloid blood cells, and the like.

[0631] Lung cancer such as non-small cell lung cancer; and small cell lung cancer;

[0632] Respiratory cancers such as malignant mesothelioma, adult; malignant mesothelioma, childhood; malignant thymoma; childhood thymoma; thymic carcinoma; bronchial adenomas/carcinoids including childhood bronchial adenomas/carcinoids; pleuropulmonary blastoma; non-small cell lung cancer; and small cell lung cancer;

[0633] Skin cancers such as Kaposi's sarcoma; Merkel cell carcinoma; melanoma; and childhood skin cancer;

[0634] AIDS-Related Malignancies;

[0635] Other childhood cancers, unusual cancers of childhood and cancers of unknown primary site;

[0636] and metastases of the aforementioned cancers can also be treated or prevented in accordance with the methods described herein. Treatment of metastatic cancers, e.g., metastatic cancers that express PD-L (Iwai et al. (2005) Int. Immunol. 17:133-144) can be effected using the methods described herein. Exemplary cancers whose growth can be inhibited include cancers typically responsive to immunotherapy. Additionally, refractory or recurrent malignancies can be treated using the molecules described herein.

[0637] In one embodiment, the present disclosure provides therapy described herein wherein cells or compostions of the invention is administered to treat a solid tumor, e.g., to inhibit the growth of a solid tumor. In embodiments the cells comprise a TA CAR molecule that targets, e.g., binds, to a tumor antigen present on a cell or population of cells in the solid tumor. Examples of solid tumors that can be treated with methods disclosed herein include malignancies, e.g., sarcomas, adenocarcinomas, and carcinomas, of the various organ systems, such as those affecting pancreas, liver, lung, breast, ovary, lymphoid, gastrointestinal (e.g., colon), genitourinary tract (e.g., renal, urothelial cells), prostate, and pharynx. Adenocarcinomas include malignancies such as most colon cancers, rectal cancer, renal-cell carcinoma, liver cancer, non-small cell carcinoma of the lung, cancer of the small intestine and cancer of the esophagus. In one embodiment, the solid tumor is a mesothelioma. Metastatic lesions of the aforementioned cancers can also be treated or prevented using the methods and compositions of the invention.

[0638] In one embodiment, the combination therapy described herein is administered to treat a CD19 negative cancer. A CD19 negative cancer can be characterized by CD19 loss (e.g., an antigen loss mutation) or other CD19 alteration that reduces the level of CD19 (e.g., caused by clonal selection of CD19-negative clones). It shall be understood that a CD19-negative cancer need not have 100% loss of CD19, and may retain some partial CD19 expression (e.g., retain some cancer cells that express CD19).

[0639] In one aspect, the present disclosure provides methods of treating cancer by providing to the subject in need thereof immune effector cells (e.g., T cells, NK cells) that are engineered to express an EGFRvIIICAR, wherein the cancer cells express EGFRvIII. In one embodiment, the cancer to be treated is glioblastoma.

[0640] In one aspect, the present disclosure provides methods of treating cancer by providing to the subject in need thereof immune effector cells (e.g., T cells, NK cells) that are engineered to express a mesothelinCAR, wherein the cancer cells express mesothelin. In one embodiment, the cancer to be treated is mesothelioma, malignant pleural mesothelioma, non-small cell lung cancer, small cell lung cancer, squamous cell lung cancer, or large cell lung cancer, pancreatic cancer, pancreatic ductal adenocarcinoma, pancreatic metatstatic, esophageal adenocarcinoma, breast cancer, ovarian cancer, colorectal cancer and bladder cancer, or any combination thereof.

[0641] In one aspect, the present disclosure provides methods of treating cancer by providing to the subject in need thereof immune effector cells (e.g., T cells, NK cells) that are engineered to express a GD2CAR, wherein the cancer cells express GD2. In one embodiment, the cancer to be treated is neuroblastoma.

[0642] In one aspect, the present disclosure provides methods of treating cancer by providing to the subject in need thereof immune effector cells (e.g., T cells, NK cells) that are engineered to express a TnCAR, wherein the cancer cells express Tn antigen. In one embodiment, the cancer to be treated is ovarian cancer, colon cancer, breast cancer, or pancreatic cancer.

[0643] In one aspect, the present disclosure provides methods of treating cancer by providing to the subject in need thereof immune effector cells (e.g., T cells, NK cells) that are engineered to express a sTnCAR, wherein the cancer cells express sTn antigen. In one embodiment, the cancer to be treated is ovarian cancer, colon cancer, breast cancer, or pancreatic cancer.

[0644] In one aspect, the present disclosure provides methods of treating cancer by providing to the subject in need thereof immune effector cells (e.g., T cells, NK cells) that are engineered to express a PSMACAR, wherein the cancer cells express PSMA. In one embodiment, the cancer to be treated is prostate cancer.

[0645] In one aspect, the present disclosure provides methods of treating cancer by providing to the subject in need thereof immune effector cells (e.g., T cells, NK cells) that are engineered to express a TAG72CAR, wherein the cancer cells express TAG72. In one embodiment, the cancer to be treated is gastrointestinal cancer.

[0646] In one aspect, the present disclosure provides methods of treating cancer by providing to the subject in need thereof immune effector cells (e.g., T cells, NK cells) that are engineered to express a CD44v6CAR, wherein the cancer cells express CD44v6. In one embodiment, the cancer to be treated is cervical cancer, AML, or MM.

[0647] In one aspect, the present disclosure provides methods of treating cancer by providing to the subject in need thereof immune effector cells (e.g., T cells, NK cells) that are engineered to express an EPCAMCAR, wherein the cancer cells express EPCAM. In one embodiment, the cancer to be treated is gastrointestinal cancer.

[0648] In one aspect, the present disclosure provides methods of treating cancer by providing to the subject in need thereof immune effector cells (e.g., T cells, NK cells) that are engineered to express a KITCAR, wherein the cancer cells express KIT. In one embodiment, the cancer to be treated is gastrointestinal cancer.

[0649] In one aspect, the present disclosure provides methods of treating cancer by providing to the subject in need thereof immune effector cells (e.g., T cells, NK cells) that are engineered to express a IL-13Ra2CAR, wherein the cancer cells express IL-13Ra2. In one embodiment, the cancer to be treated is glioblastoma.

[0650] In one aspect, the present disclosure provides methods of treating cancer by providing to the subject in need thereof immune effector cells (e.g., T cells, NK cells) that are engineered to express a CD171CAR, wherein the cancer cells express CD171. In one embodiment, the cancer to be treated is neuroblastoma, ovarian cancer, melanoma, breast cancer, pancreatic cancer, colon cancers, or NSCLC (non-small cell lung cancer).

[0651] In one aspect, the present disclosure provides methods of treating cancer by providing to the subject in need thereof immune effector cells (e.g., T cells, NK cells) that are engineered to express a PSCACAR, wherein the cancer cells express PSCA. In one embodiment, the cancer to be treated is prostate cancer.

[0652] In one aspect, the present disclosure provides methods of treating cancer by providing to the subject in need thereof immune effector cells (e.g., T cells, NK cells) that are engineered to express a LewisYCAR, wherein the cancer cells express LewisY. In one embodiment, the cancer to be treated is ovarian cancer, or AML.

[0653] In one aspect, the present disclosure provides methods of treating cancer by providing to the subject in need thereof immune effector cells (e.g., T cells, NK cells) that are engineered to express a PDGFR-betaCAR, wherein the cancer cells express PDGFR-beta. In one embodiment, the cancer to be treated is breast cancer, prostate cancer, GIST (gastrointestinal stromal tumor), CML, DFSP (dermatofibrosarcoma protuberans), or glioma.

[0654] In one aspect, the present disclosure provides methods of treating cancer by providing to the subject in need thereof immune effector cells (e.g., T cells, NK cells) that are engineered to express a SSEA-4CAR, wherein the cancer cells express SSEA-4. In one embodiment, the cancer to be treated is glioblastoma, breast cancer, lung cancer, or stem cell cancer.

[0655] In one aspect, the present disclosure provides methods of treating cancer by providing to the subject in need thereof immune effector cells (e.g., T cells, NK cells) that are engineered to express a Folate receptor alphaCAR, wherein the cancer cells express folate receptor alpha.

[0656] In one embodiment, the cancer to be treated is ovarian cancer, NSCLC, endometrial cancer, renal cancer, or other solid tumors.

[0657] In one aspect, the present disclosure provides methods of treating cancer by providing to the subject in need thereof immune effector cells (e.g., T cells, NK cells) that are engineered to express an ERBB2CAR, wherein the cancer cells express ERBB2 (Her2/neu). In one embodiment, the cancer to be treated is breast cancer, gastric cancer, colorectal cancer, lung cancer, or other solid tumors.

[0658] In one aspect, the present disclosure provides methods of treating cancer by providing to the subject in need thereof immune effector cells (e.g., T cells, NK cells) that are engineered to express a MUC1 CAR, wherein the cancer cells express MUC1. In one embodiment, the cancer to be treated is breast cancer, lung cancer, or other solid tumors.

[0659] In one aspect, the present disclosure provides methods of treating cancer by providing to the subject in need thereof immune effector cells (e.g., T cells, NK cells) that are engineered to express an EGFRCAR, wherein the cancer cells express EGFR In one embodiment, the cancer to be treated is glioblastoma, SCLC (small cell lung cancer), SCCHN (squamous cell carcinoma of the head and neck), NSCLC, or other solid tumors.

[0660] In one aspect, the present disclosure provides methods of treating cancer by providing to the subject in need thereof immune effector cells (e.g., T cells, NK cells) that are engineered to express a NCAMCAR, wherein the cancer cells express NCAM. In one embodiment, the cancer to be treated is neuroblastoma, or other solid tumors.

[0661] In one aspect, the present disclosure provides methods of treating cancer by providing to the subject in need thereof immune effector cells (e.g., T cells, NK cells) that are engineered to express a CAIXCAR, wherein the cancer cells express CAIX. In one embodiment, the cancer to be treated is renal cancer, CRC, cervical cancer, or other solid tumors.

[0662] In one aspect, the present disclosure provides methods of treating cancer by providing to the subject in need thereof immune effector cells (e.g., T cells, NK cells) that are engineered to express a HMWMAACAR, wherein the cancer cells express HMWMAA. In one embodiment, the cancer to be treated is melanoma, glioblastoma, or breast cancer.

[0663] In one aspect, the present disclosure provides methods of treating cancer by providing to the subject in need thereof immune effector cells (e.g., T cells, NK cells) that are engineered to express an o-acetyl-GD2CAR, wherein the cancer cells express o-acetyl-GD2. In one embodiment, the cancer to be treated is neuroblastoma, or melanoma.

[0664] In one aspect, the present disclosure provides methods of treating cancer by providing to the subject in need thereof immune effector cells (e.g., T cells, NK cells) that are engineered to express a CLDN6CAR, wherein the cancer cells express CLDN6. In one embodiment, the cancer to be treated is ovarian cancer, lung cancer, or breast cancer.

[0665] In one aspect, the present disclosure provides methods of treating cancer by providing to the subject in need thereof immune effector cells (e.g., T cells, NK cells) that are engineered to express a TSHRCAR, wherein the cancer cells express TSHR. In one embodiment, the cancer to be treated is thyroid cancer, or multiple myeloma.

[0666] In one aspect, the present disclosure provides methods of treating cancer by providing to the subject in need thereof immune effector cells (e.g., T cells, NK cells) that are engineered to express a CD97CAR, wherein the cancer cells express CD97. In one embodiment, the cancer to be treated is B cell malignancies, gastric cancer, pancreatic cancer, esophageal cancer, glioblastoma, breast cancer, or colorectal cancer.

[0667] In one aspect, the present disclosure provides methods of treating cancer by providing to the subject in need thereof immune effector cells (e.g., T cells, NK cells) that are engineered to express a Plysialic acid CAR, wherein the cancer cells express Plysialic acid. In one embodiment, the cancer to be treated is small cell lung cancer.

[0668] In one aspect, the present disclosure provides methods of treating cancer by providing to the subject in need thereof immune effector cells (e.g., T cells, NK cells) that are engineered to express a PLAC1CAR, wherein the cancer cells express PLAC1. In one embodiment, the cancer to be treated is HCC (hepatocellular carcinoma).

[0669] In one aspect, the present disclosure provides methods of treating cancer by providing to the subject in need thereof immune effector cells (e.g., T cells, NK cells) that are engineered to express a GloboHCAR, wherein the cancer cells express GloboH. In one embodiment, the cancer to be treated is ovarian cancer, gastric cancer, prostate cancer, lung cancer, breast cancer, or pancreatic cancer.

[0670] In one aspect, the present disclosure provides methods of treating cancer by providing to the subject in need thereof immune effector cells (e.g., T cells, NK cells) that are engineered to express a NY-BR-1CAR, wherein the cancer cells express NY-BR-1. In one embodiment, the cancer to be treated is breast cancer.

[0671] In one aspect, the present disclosure provides methods of treating cancer by providing to the subject in need thereof immune effector cells (e.g., T cells, NK cells) that are engineered to express a MAD-CT-1CAR, wherein the cancer cells express MAD-CT-1. In one embodiment, the cancer to be treated is prostate cancer, or melanoma.

[0672] In one aspect, the present disclosure provides methods of treating cancer by providing to the subject in need thereof immune effector cells (e.g., T cells, NK cells) that are engineered to express a MAD-CT-2CAR, wherein the cancer cells express MAD-CT-2. In one embodiment, the cancer to be treated is prostate cancer, melanoma.

[0673] In one aspect, the present disclosure provides methods of treating cancer by providing to the subject in need thereof immune effector cells (e.g., T cells, NK cells) that are engineered to express a Fos-related antigen 1 CAR, wherein the cancer cells express Fos-related antigen 1.

[0674] In one embodiment, the cancer to be treated is glioma, squamous cell cancer, or pancreatic cancer.

[0675] In one aspect, the present disclosure provides methods of treating cancer by providing to the subject in need thereof immune effector cells (e.g., T cells, NK cells) that are engineered to express a ML-IAP CAR, wherein the cancer cells express ML-IAP. In one embodiment, the cancer to be treated is melanoma.

[0676] In one aspect, the present disclosure provides methods of treating cancer by providing to the subject in need thereof immune effector cells (e.g., T cells, NK cells) that are engineered to express a NA17CAR, wherein the cancer cells express NA17. In one embodiment, the cancer to be treated is melanoma.

[0677] In one aspect, the present disclosure provides methods of treating cancer by providing to the subject in need thereof immune effector cells (e.g., T cells, NK cells) that are engineered to express a TRP-2CAR, wherein the cancer cells express TRP-2. In one embodiment, the cancer to be treated is melanoma.

[0678] In one aspect, the present disclosure provides methods of treating cancer by providing to the subject in need thereof immune effector cells (e.g., T cells, NK cells) that are engineered to express a CYPIBICAR, wherein the cancer cells express CYP1B1. In one embodiment, the cancer to be treated is breast cancer, colon cancer, lung cancer, esophagus cancer, skin cancer, lymph node cancer, brain cancer, or testis cancer.

[0679] In one aspect, the present disclosure provides methods of treating cancer by providing to the subject in need thereof immune effector cells (e.g., T cells, NK cells) that are engineered to express a RAGE-1CAR, wherein the cancer cells express RAGE-1. In one embodiment, the cancer to be treated is RCC (renal cell cancer), or other solid tumors

[0680] In one aspect, the present disclosure provides methods of treating cancer by providing to the subject in need thereof immune effector cells (e.g., T cells, NK cells) that are engineered to express a human telomerase reverse transcriptaseCAR, wherein the cancer cells express human telomerase reverse transcriptase. In one embodiment, the cancer to be treated is solid tumors.

[0681] In one aspect, the present disclosure provides methods of treating cancer by providing to the subject in need thereof immune effector cells (e.g., T cells, NK cells) that are engineered to express an intestinal carboxyl esteraseCAR, wherein the cancer cells express intestinal carboxyl esterase. In one embodiment, the cancer to be treated is thyroid cancer, RCC, CRC (colorectal cancer), breast cancer, or other solid tumors.

[0682] In one aspect, the present disclosure provides methods of treating cancer by providing to the subject in need thereof immune effector cells (e.g., T cells, NK cells) that are engineered to express a mut hsp70-2CAR, wherein the cancer cells express mut hsp70-2. In one embodiment, the cancer to be treated is melanoma.

### Combination Therapies

[0683] The CAR-expressing cells (e.g., a cell comprising, e.g., engineered to express, a TA CAR and a BCA CAR) described herein may be used in combination with other known agents and therapies.

[0684] The combination therapy described herein, e.g., comprising a cell of the invention, can be administered in combination with at least one additional therapeutic agent. In an embodiment, a CAR-expressing cell described herein, and the at least one additional therapeutic agent can be administered simultaneously, in the same or in separate compositions, or sequentially. For sequential administration, the CAR-expressing cell described herein can be administered first, and the additional agent can be administered second, or the order of administration can be reversed.

[0685] In further aspects, a CAR-expressing cell described herein may be used in a treatment regimen in combination with surgery, chemotherapy, radiation, immunosuppressive agents, such as cyclosporin, azathioprine, methotrexate, mycophenolate, and FK506, antibodies, or other immunoablative agents such as CAMPATH, anti-CD3 antibodies or other antibody therapies, cytoxin, fludarabine, cyclosporin, FK506, rapamycin, mycophenolic acid, steroids, FR901228, cytokines, irradiation, and peptide vaccine, such as that described in Izumoto et al. 2008 J Neurosurg 108:963-971.

[0686] In one embodiment, a CAR-expressing cell described herein may be used in combination with a lymphodepleting agent. An exemplary lymphodepleting agent reduces or decreases lymphocytes, e.g., B cell lymphocytes and/or T cell lymphocytes, prior to immunotherapy. Exemplary lymphodepleting agents include fludarabine, cyclophosphamide, corticosteroids, alemtuzumab, or total body irradiation (TBI), or a combination thereof. For example, a combination of fludarabine and cyclophosphamide is administered prior to or simultaneously with administration of a cell of the invention described herein.

[0687] In one embodiment, a CAR-expressing cell described herein may be used in combination with an agent that treats B cell aplasia. Persistent B cell aplasia leads to hypogammaglobulinemia and may increase the risk of infection. Agents for treating B cell aplasia includes intravenous immunoglobulin (IVIG), e.g., FLEBOGAMMA™, GAMUNEX-C®, PRIVIGEN®, and GAMMAGARD®.

[0688] In one embodiment, a CAR-expressing cell described herein can be used in combination with a chemotherapeutic agent. Exemplary chemotherapeutic agents include an anthracycline (e.g., doxorubicin (e.g., liposomal doxorubicin)). a vinca alkaloid (e.g., vinblastine, vincristine, vindesine, vinorelbine), an alkylating agent (e.g., cyclophosphamide, decarbazine, melphalan, ifosfamide, temozolomide), an immune cell antibody (e.g., alemtuzamab, gemtuzumab, rituximab, tositumomab), an antimetabolite (including, e.g., folic acid antagonists, pyrimidine analogs, purine analogs and adenosine deaminase inhibitors (e.g., fludarabine)), an mTOR inhibitor, a TNFR glucocorticoid induced TNFR related protein (GITR) agonist, a proteasome inhibitor (e.g., aclacinomycin A, gliotoxin or bortezomib), an immunomodulator such as thalidomide or a thalidomide derivative (e.g., lenalidomide).

[0689] General Chemotherapeutic agents considered for use in combination therapies include anastrozole (Arimidex®), bicalutamide (Casodex®), bleomycin sulfate (Blenoxane®), busulfan (Myleran®), busulfan injection (Busulfex®), capecitabine (Xeloda®), N4-pentoxycarbonyl-5-deoxy-5-fluorocytidine, carboplatin (Paraplatin®), carmustine (BiCNU®), chlorambucil (Leukeran®), cisplatin (Platinol®), cladribine (Leustatin®), cyclophosphamide (Cytoxan® or Neosar®), cytarabine, cytosine arabinoside (Cytosar-U®), cytarabine liposome injection (DepoCyt®), dacarbazine (DTIC-Dome®), dactinomycin (Actinomycin D, Cosmegan), daunorubicin hydrochloride (Cerubidine®), daunorubicin citrate liposome injection (DaunoXome®), dexamethasone, docetaxel (Taxotere®), doxorubicin hydrochloride (Adriamycin®, Rubex®), etoposide (Vepesid®), fludarabine phosphate (Fludara®), 5-fluorouracil (Adrucil®, Efudex®), flutamide (Eulexin®), tezacitibine, Gemcitabine (difluorodeoxycitidine), hydroxyurea (Hydrea®), Idarubicin (Idamycin®), ifosfamide (IFEX®), irinotecan (Camptosar®), L-asparaginase (ELSPAR®), leucovorin calcium, melphalan (Alkeran®), 6-mercaptopurine (Purinethol®), methotrexate (Folex®), mitoxantrone (Novantrone®), mylotarg, paclitaxel (Taxol®), phoenix (Yttrium90/MX-DTPA), pentostatin, polifeprosan 20 with carmustine implant (Gliadel®), tamoxifen citrate (Nolvadex®), teniposide (Vumon®), 6-thioguanine, thiotepa, tirapazamine (Tirazone®), topotecan hydrochloride for injection (Hycamptin®), vinblastine (Velban®), vincristine (Oncovin®), and vinorelbine (Navelbine®).

[0690] Exemplary alkylating agents include, without limitation, nitrogen mustards, ethylenimine derivatives, alkyl sulfonates, nitrosoureas and triazenes): uracil mustard (Aminouracil Mustard®, Chlorethaminacil®, Demethyldopan®, Desmethyldopan®, Haemanthamine®, Nordopan®, Uracil nitrogen Mustard®, Uracillost®, Uracilmostaza®, Uramustin®, Uramustine®), chlormethine (Mustargen®), cyclophosphamide (Cytoxan®, Neosar®, Clafen®, Endoxan®, Procytox®, Revimmune™), ifosfamide (Mitoxana®), melphalan (Alkeran®), Chlorambucil (Leukeran®), pipobroman (Amedel®, Vercyte®), triethylenemelamine (Hemel®, Hexalen®, Hexastat®), triethylenethiophosphoramine, Temozolomide (Temodar®), thiotepa (Thioplex®), busulfan (Busilvex®, Myleran®), carmustine (BiCNU®), lomustine (CeeNU®), streptozocin (Zanosar®), and Dacarbazine (DTIC-Dome®). Additional exemplary alkylating agents include, without limitation, Oxaliplatin (Eloxatin®); Temozolomide (Temodar® and Temodal®); Dactinomycin (also known as actinomycin-D, Cosmegen®); Melphalan (also known as L-PAM, L-sarcolysin, and phenylalanine mustard, Alkeran®); Altretamine (also known as hexamethylmelamine (HMM), Hexalen®); Carmustine (BiCNU®); Bendamustine (Treanda®); Busulfan (Busulfex® and Myleran®); Carboplatin (Paraplatin®); Lomustine (also known as CCNU, CeeNU®); Cisplatin (also known as CDDP, Platinol® and Platinol®-AQ); Chlorambucil (Leukeran®); Cyclophosphamide (Cytoxan® and Neosar®); Dacarbazine (also known as DTIC, DIC and imidazole carboxamide, DTIC-Dome®); Altretamine (also known as hexamethylmelamine (HMM), Hexalen®); Ifosfamide (Ifex®); Prednumustine; Procarbazine (Matulane®); Mechlorethamine (also known as nitrogen mustard, mustine and mechloroethamine hydrochloride, Mustargen®); Streptozocin (Zanosar®); Thiotepa (also known as thiophosphoamide, TESPA and TSPA, Thioplex®); Cyclophosphamide (Endoxan®, Cytoxan®, Neosar®, Procytox®, Revimmune®); and Bendamustine HCl (Treanda®). Exemplary mTOR inhibitors include, e.g., temsirolimus; ridaforolimus (formally known as deferolimus, (1R,2R,4S)-4-[(2R)-2 [(1R,9S,12S,15R,16E,18R,19R,21R,23S,24E,26E,28Z,30S,32S,35R)-1, 18-dihydroxy-19,30-dimethoxy-15,17,21,23, 29,35-hexamethyl-2,3,10,14,20-pentaoxo-11,36-dioxa-4-azatricyclo[30.3.1.0^{4,9}] hexatriaconta-16,24,26,28-tetraen-12-yl]propyl]-2-methoxycyclohexyl dimethylphosphinate, also known as AP23573 and MK8669, and described in PCT Publication No. WO 03/064383); everolimus (Afinitor® or RAD001); rapamycin (AY22989, Sirolimus®); simapimod (CAS 164301-51-3); emsirolimus, (5-{2,4-Bis[(3S)-3-methylmorpholin-4-yl]pyrido[2,3-d]pyrimidin-7-yl}-2-methoxyphenyl)methanol (AZD8055); 2-Amino-8-[trans-4-(2-hydroxyethoxy)cyclohexyl]-6-(6-methoxy-3-pyridinyl)-4-methyl-pyrido[2,3-d]pyrimidin-7(8H)-one (PF04691502, CAS 1013101-36-4); and N²-[1,4-dioxo-4-[[4-(4-oxo-8-phenyl-4H-1-benzopyran-2-yl)morpholinium-4-yl]methoxy]butyl]-L-arginylglycyl-L-α-aspartylL-serine-(SEQ ID NO: 264), inner salt (SF1126, CAS 936487-67-1), and XL765.

[0691] Exemplary immunomodulators include, e.g., afutuzumab (available from Roche®); pegfilgrastim (Neulasta®); lenalidomide (CC-5013, Revlimid®); thalidomide (Thalomid®), actimid (CC4047); and 1RX-2 (mixture of human cytokines including interleukin 1, interleukin 2, and interferon γ, CAS 951209-71-5, available from IRX Therapeutics).

[0692] Exemplary anthracyclines include, e.g., doxorubicin (Adriamycin® and Rubex®); bleomycin (Lenoxane®); daunorubicin (dauorubicin hydrochloride, daunomycin, and rubidomycin hydrochloride, Cerubidine®); daunorubicin liposomal (daunorubicin citrate liposome, DaunoXome®); mitoxantrone (DHAD, Novantrone®); epirubicin (Ellence™); idarubicin (Idamycin®, Idamycin PFS®); mitomycin C (Mutamycin®); geldanamycin; herbimycin; ravidomycin; and desacetylravidomycin.

[0693] Exemplary vinca alkaloids include, e.g., vinorelbine tartrate (Navelbine®), Vincristine (Oncovin®), and Vindesine (Eldisine®)); vinblastine (also known as vinblastine sulfate, vincaleukoblastine and VLB, Alkaban-AQ® and Velban®); and vinorelbine (Navelbine®). Exemplary proteosome inhibitors include bortezomib (Velcade®); carfilzomib (PX-171-007, (S)-4-Methyl-N-((S)-1-(((S)-4-methyl-1-((R)-2-methyloxiran-2-yl)-1-oxopentan-2-yl)amino)-1-oxo-3-phenylpropan-2-yl)-2-((S)-2-(2-morpholinoacetamido)-4-phenylbutanamido)-pentanamide); marizomib (NPI-0052); ixazomib citrate (MLN-9708); delanzomib (CEP-18770); and O-Methyl-N-[(2-methyl-5-thiazolyl)carbonyl]-L-seryl-O-methyl-N-[(1S)-2-[(2R)-2-methyl-2-oxiranyl]-2-oxo-1-(phenylmethyl)ethyl]-L-serinamide (ONX-0912).

[0694] In embodiments, a CAR-expressing cell described herein is administered to a subject in combination with brentuximab. Brentuximab is an antibody-drug conjugate of anti-CD30 antibody and monomethyl auristatin E. In embodiments, the subject has Hodgkin's lymphoma (HL), e.g., relapsed or refractory HL. In embodiments, the subject comprises CD30+HL. In embodiments, the subject has undergone an autologous stem cell transplant (ASCT). In embodiments, the subject has not undergone an ASCT. In embodiments, brentuximab is administered at a dosage of about 1-3 mg/kg (e.g., about 1-1.5, 1.5-2, 2-2.5, or 2.5-3 mg/kg), e.g., intravenously, e.g., every 3 weeks.

[0695] In embodiments, a CAR-expressing cell described herein is administered to a subject in combination with brentuximab and dacarbazine or in combination with brentuximab and bendamustine. Dacarbazine is an alkylating agent with a chemical name of 5-(3,3-Dimethyl-1-triazenyl)imidazole-4-carboxamide. Bendamustine is an alkylating agent with a chemical name of 4-[5-[Bis(2-chloroethyl)amino]-1-methylbenzimidazol-2-yl]butanoic acid. In embodiments, the subject has Hodgkin's lymphoma (HL). In embodiments, the subject has not previously been treated with a cancer therapy. In embodiments, the subject is at least 60 years of age, e.g., 60, 65, 70, 75, 80, 85, or older. In embodiments, dacarbazine is administered at a dosage of about 300-450 mg/m² (e.g., about 300-325, 325-350, 350-375, 375-400, 400-425, or 425-450 mg/m²), e.g., intravenously. In embodiments, bendamustine is administered at a dosage of about 75-125 mg/m2 (e.g., 75-100 or 100-125 mg/m², e.g., about 90 mg/m²), e.g., intravenously. In embodiments, brentuximab is administered at a dosage of about 1-3 mg/kg (e.g., about 1-1.5, 1.5-2, 2-2.5, or 2.5-3 mg/kg), e.g., intravenously, e.g., every 3 weeks.

[0696] In some embodiments, a CAR-expressing cell described herein is administered to a subject in combination with a CD20 inhibitor, e.g., an anti-CD20 antibody (e.g., an anti-CD20 mono- or bispecific antibody) or a fragment thereof. Exemplary anti-CD20 antibodies include but are not limited to rituximab, ofatumumab, ocrelizumab, veltuzumab, obinutuzumab, TRU-015 (Trubion Pharmaceuticals), ocaratuzumab, and Prol31921 (Genentech). See, e.g., Lim et al. Haematologica. 95.1(2010): 135-43.

[0697] In some embodiments, the anti-CD20 antibody comprises rituximab. Rituximab is a chimeric mouse/human monoclonal antibody IgG1 kappa that binds to CD20 and causes cytolysis of a CD20 expressing cell, e.g., as described in www.accessdata.fda.govdrugsatfda_docs/label/2010/103705s5311b1.pdf. In embodiments, a CAR-expressing cell described herein is administered to a subject in combination with rituximab. In embodiments, the subject has CLL or SLL.

[0698] In some embodiments, rituximab is administered intravenously, e.g., as an intravenous infusion. For example, each infusion provides about 500-2000 mg (e.g., about 500-550, 550-600, 600-650, 650-700, 700-750, 750-800, 800-850, 850-900, 900-950, 950-1000, 1000-1100, 1100-1200, 1200-1300, 1300-1400, 1400-1500, 1500-1600, 1600-1700, 1700-1800, 1800-1900, or 1900-2000 mg) of rituximab. In some embodiments, rituximab is administered at a dose of 150 mg/m² to 750 mg/m², e.g., about 150-175 mg/m², 175-200 mg/m², 200-225 mg/m², 225-250 mg/m², 250-300 mg/m², 300-325 mg/m², 325-350 mg/m², 350-375 mg/m², 375-400 mg/m², 400-425 mg/m², 425-450 mg/m², 450-475 mg/m², 475-500 mg/m², 500-525 mg/m², 525-550 mg/m², 550-575 mg/m², 575-600 mg/m², 600-625 mg/m², 625-650 mg/m², 650-675 mg/m², or 675-700 mg/m², where m² indicates the body surface area of the subject. In some embodiments, rituximab is administered at a dosing interval of at least 4 days, e.g., 4, 7, 14, 21, 28, 35 days, or more. For example, rituximab is administered at a dosing interval of at least 0.5 weeks, e.g., 0.5, 1, 2, 3, 4, 5, 6, 7, 8 weeks, or more. In some embodiments, rituximab is administered at a dose and dosing interval described herein for a period of time, e.g., at least 2 weeks, e.g., at least 2, 3, 4, 5, 6, 7, 8, 9, 10, 11, 12, 13, 14, 15, 16, 17, 18, 19, 20 weeks, or greater. For example, rituximab is administered at a dose and dosing interval described herein for a total of at least 4 doses per treatment cycle (e.g., at least 4, 5, 6, 7, 8, 9, 10, 11, 12, 13, 14, 15, 16, or more doses per treatment cycle).

[0699] In some embodiments, the anti-CD20 antibody comprises ofatumumab. Ofatumumab is an anti-CD20 IgG1K human monoclonal antibody with a molecular weight of approximately 149 kDa. For example, ofatumumab is generated using transgenic mouse and hybridoma technology and is expressed and purified from a recombinant murine cell line (NSO). See, e.g., www.accessdata.fda.gov/drugsatfda_docs/label/2009/1253261b1.pdf; and Clinical Trial Identifier number NCT01363128, NCT01515176, NCT01626352, and NCT01397591. In embodiments, a CAR-expressing cell described herein is administered to a subject in combination with ofatumumab. In embodiments, the subject has CLL or SLL.

[0700] In some embodiments, ofatumumab is administered as an intravenous infusion. For example, each infusion provides about 150-3000 mg (e.g., about 150-200, 200-250, 250-300, 300-350, 350-400, 400-450, 450-500, 500-550, 550-600, 600-650, 650-700, 700-750, 750-800, 800-850, 850-900, 900-950, 950-1000, 1000-1200, 1200-1400, 1400-1600, 1600-1800, 1800-2000, 2000-2200, 2200-2400, 2400-2600, 2600-2800, or 2800-3000 mg) of ofatumumab. In embodiments, ofatumumab is administered at a starting dosage of about 300 mg, followed by 2000 mg, e.g., for about 11 doses, e.g., for 24 weeks. In some embodiments, ofatumumab is administered at a dosing interval of at least 4 days, e.g., 4, 7, 14, 21, 28, 35 days, or more. For example, ofatumumab is administered at a dosing interval of at least 1 week, e.g., 1, 2, 3, 4, 5, 6, 7, 8, 9, 10, 11, 12, 24, 26, 28, 20, 22, 24, 26, 28, 30 weeks, or more. In some embodiments, ofatumumab is administered at a dose and dosing interval described herein for a period of time, e.g., at least 1 week, e.g., 1, 2, 3, 4, 5, 6, 7, 8, 9, 10, 11, 12, 13, 14, 15, 16, 17, 18, 19, 20, 22, 24, 26, 28, 30, 40, 50, 60 weeks or greater, or 1, 2, 3, 4, 5, 6, 7, 8, 9, 10, 11, 12 months or greater, or 1, 2, 3, 4, 5 years or greater. For example, ofatumumab is administered at a dose and dosing interval described herein for a total of at least 2 doses per treatment cycle (e.g., at least 2, 3, 4, 5, 6, 7, 8, 9, 10, 11, 12, 13, 14, 15, 16, 18, 20, or more doses per treatment cycle).

[0701] In some cases, the anti-CD20 antibody comprises ocrelizumab. Ocrelizumab is a humanized anti-CD20 monoclonal antibody, e.g., as described in Clinical Trials Identifier Nos. NCT00077870, NCT01412333, NCT00779220, NCT00673920, NCT01194570, and Kappos et al. Lancet. 19.378(2011):1779-87.

[0702] In some cases, the anti-CD20 antibody comprises veltuzumab. Veltuzumab is a humanized monoclonal antibody against CD20. See, e.g., Clinical Trial Identifier No. NCT00547066, NCT00546793, NCT01101581, and Goldenberg et al. Leuk Lymphoma. 51(5)(2010):747-55.

[0703] In some cases, the anti-CD20 antibody comprises GA101. GA101 (also called obinutuzumab or R05072759) is a humanized and glyco-engineered anti-CD20 monoclonal antibody. See, e.g., Robak. Curr. Opin. Investig. Drugs. 10.6(2009):588-96; Clinical Trial Identifier Numbers: NCT01995669, NCT01889797, NCT02229422, and NCT01414205; and www.accessdata.fda.gov/drugsatfda_docs/label/2013/125486s0001b1. pdf.

[0704] In some cases, the anti-CD20 antibody comprises AME-133v. AME-133v (also called LY2469298 or ocaratuzumab) is a humanized IgG1 monoclonal antibody against CD20 with increased affinity for the FcγRIIIa receptor and an enhanced antibody dependent cellular cytotoxicity (ADCC) activity compared with rituximab. See, e.g., Robak et al. BioDrugs 25.1(2011):13-25; and Forero-Torres et al. Clin Cancer Res. 18.5(2012):1395-403.

[0705] In some cases, the anti-CD20 antibody comprises PRO 131921. PRO 131921 is a humanized anti-CD20 monoclonal antibody engineered to have better binding to FcγRIIIa and enhanced ADCC compared with rituximab. See, e.g., Robak et al. BioDrugs 25.1(2011):13-25; and Casulo et al. Clin Immunol. 154.1(2014):37-46; and Clinical Trial Identifier No. NCT00452127.

[0706] In some cases, the anti-CD20 antibody comprises TRU-015. TRU-015 is an anti-CD20 fusion protein derived from domains of an antibody against CD20. TRU-015 is smaller than monoclonal antibodies, but retains Fc-mediated effector functions. See, e.g., Robak et al. BioDrugs 25.1(2011): 13-25. TRU-015 contains an anti-CD20 single-chain variable fragment (scFv) linked to human IgG1 hinge, CH2, and CH3 domains but lacks CHI and CL domains.

[0707] In some embodiments, an anti-CD20 antibody described herein is conjugated or otherwise bound to a therapeutic agent, e.g., a chemotherapeutic agent (e.g., cytoxan, fludarabine, histone deacetylase inhibitor, demethylating agent, peptide vaccine, anti-tumor antibiotic, tyrosine kinase inhibitor, alkylating agent, anti-microtubule or anti-mitotic agent), anti-allergic agent, anti-nausea agent (or anti-emetic), pain reliever, or cytoprotective agent described herein.

[0708] In embodiments, a CAR-expressing cell described herein is administered to a subject in combination with a B-cell lymphoma 2 (BCL-2) inhibitor (e.g., venetoclax, also called ABT-199 or GDC-0199;) and/or rituximab. In embodiments, a CAR-expressing cell described herein is administered to a subject in combination with venetoclax and rituximab. Venetoclax is a small molecule that inhibits the anti-apoptotic protein, BCL-2. The structure of venetoclax (4-(4-{[2-(4-chlorophenyl)-4,4-dimethylcyclohex-1-en-1-yl]methyl}piperazin-1-yl)-N-({3-nitro-4-[(tetrahydro-2H-pyran-4-ylmethyl)amino]phenyl}sulfonyl)-2-(1H-pyrrolo[2,3-b]pyridin-5-yloxy)benzamide) is shown below.

[chemical structure]

[0709] In embodiments, the subject has CLL. In embodiments, the subject has relapsed CLL, e.g., the subject has previously been administered a cancer therapy. In embodiments, venetoclax is administered at a dosage of about 15-600 mg (e.g., 15-20, 20-50, 50-75, 75-100, 100-200, 200-300, 300-400, 400-500, or 500-600 mg), e.g., daily. In embodiments, rituximab is administered at a dosage of about 350-550 mg/m2 (e.g., 350-375, 375-400, 400-425, 425-450, 450-475, or 475-500 mg/m2), e.g., intravenously, e.g., monthly.

[0710] In some embodiments, a CAR-expressing cell described herein is administered in combination with an oncolytic virus. In embodiments, oncolytic viruses are capable of selectively replicating in and triggering the death of or slowing the growth of a cancer cell. In some cases, oncolytic viruses have no effect or a minimal effect on non-cancer cells. An oncolytic virus includes but is not limited to an oncolytic adenovirus, oncolytic Herpes Simplex Viruses, oncolytic retrovirus, oncolytic parvovirus, oncolytic vaccinia virus, oncolytic Sinbis virus, oncolytic influenza virus, or oncolytic RNA virus (e.g., oncolytic reovirus, oncolytic Newcastle Disease Virus (NDV), oncolytic measles virus, or oncolytic vesicular stomatitis virus (VSV)).

[0711] In some embodiments, the oncolytic virus is a virus, e.g., recombinant oncolytic virus, described in US2010/0178684 A1, which is incorporated herein by reference in its entirety. In some embodiments, a recombinant oncolytic virus comprises a nucleic acid sequence (e.g., heterologous nucleic acid sequence) encoding an inhibitor of an immune or inflammatory response, e.g., as described in US2010/0178684 A1, incorporated herein by reference in its entirety. In embodiments, the recombinant oncolytic virus, e.g., oncolytic NDV, comprises a pro-apoptotic protein (e.g., apoptin), a cytokine (e.g., GM-CSF, interferon-gamma, interleukin-2 (IL-2), tumor necrosis factor-alpha), an immunoglobulin (e.g., an antibody against ED-B firbonectin), tumor associated antigen, a bispecific adapter protein (e.g., bispecific antibody or antibody fragment directed against NDV HN protein and a T cell co-stimulatory receptor, such as CD3 or CD28; or fusion protein between human IL-2 and single chain antibody directed against NDV HN protein). See, e.g., Zamarin et al. Future Microbiol. 7.3(2012):347-67, incorporated herein by reference in its entirety. In some embodiments, the oncolytic virus is a chimeric oncolytic NDV described in U.S. Pat. No. 8,591,881 B2, US 2012/0122185 A1, or US 2014/0271677 A1, each of which is incorporated herein by reference in their entireties.

[0712] In some embodiments, the oncolytic virus comprises a conditionally replicative adenovirus (CRAd), which is designed to replicate exclusively in cancer cells. See, e.g., Alemany et al. Nature Biotechnol. 18(2000):723-27. In some embodiments, an oncolytic adenovirus comprises one described in Table 1 on page 725 of Alemany et al., incorporated herein by reference in its entirety.

[0713] Exemplary oncolytic viruses include but are not limited to the following: Group B Oncolytic Adenovirus (ColoAd1) (PsiOxus Therapeutics Ltd.) (see, e.g., Clinical Trial Identifier: NCT02053220); ONCOS-102 (previously called CGTG-102), which is an adenovirus comprising granulocyte-macrophage colony stimulating factor (GM-CSF) (Oncos Therapeutics) (see, e.g., Clinical Trial Identifier: NCT01598129); VCN-01, which is a genetically modified oncolytic human adenovirus encoding human PH20 hyaluronidase (VCN Biosciences, S.L.) (see, e.g., Clinical Trial Identifiers: NCT02045602 and NCT02045589); Conditionally Replicative Adenovirus 1COVIR-5, which is a virus derived from wild-type human adenovirus serotype 5 (Had5) that has been modified to selectively replicate in cancer cells with a deregulated retinoblastoma/E2F pathway (Institut Català d'Oncologia) (see, e.g., Clinical Trial Identifier: NCT01864759); Celyvir, which comprises bone marrow-derived autologous mesenchymal stem cells (MSCs) infected with ICOVIR5, an oncolytic adenovirus (Hospital Infantil Universitario Nino Jesus, Madrid, Spain/Ramon Alemany) (see, e.g., Clinical Trial Identifier: NCT01844661); CG0070, which is a conditionally replicating oncolytic serotype 5 adenovirus (Ad5) in which human E2F-1 promoter drives expression of the essential E1a viral genes, thereby restricting viral replication and cytotoxicity to Rb pathway-defective tumor cells (Cold Genesys, Inc.) (see, e.g., Clinical Trial Identifier: NCT02143804); or DNX-2401 (formerly named Delta-24-RGD), which is an adenovirus that has been engineered to replicate selectively in retinoblastoma (Rb)-pathway deficient cells and to infect cells that express certain RGD-binding integrins more efficiently (Clinica Universidad de Navarra, Universidad de Navarra/DNAtrix, Inc.) (see, e.g., Clinical Trial Identifier: NCT01956734).

[0714] In some embodiments, an oncolytic virus described herein is administering by injection, e.g., subcutaneous, intra-arterial, intravenous, intramuscular, intrathecal, or intraperitoneal injection. In embodiments, an oncolytic virus described herein is administered intratumorally, transdermally, transmucosally, orally, intranasally, or via pulmonary administration.

In an embodiment, cells expressing a CAR described herein are administered to a subject in combination with a molecule that decreases the Treg cell population. Methods that decrease the number of (e.g., deplete) Treg cells are known in the art and include, e.g., CD25 depletion, cyclophosphamide administration, modulating GITR function. Without wishing to be bound by theory, it is believed that reducing the number of Treg cells in a subject prior to apheresis or prior to administration of a CAR-expressing cell described herein reduces the number of unwanted immune cells (e.g., Tregs) in the tumor microenvironment and reduces the subject's risk of relapse.

[0715] In one embodiment, cells expressing a CAR described herein are administered to a subject in combination with a molecule targeting GITR and/or modulating GITR functions, such as a GITR agonist and/or a GITR antibody that depletes regulatory T cells (Tregs). In one embodiment, the GITR binding molecules and/or molecules modulating GITR functions (e.g., GITR agonist and/or Treg depleting GITR antibodies) are administered prior to the CAR-expressing cell. For example, in one embodiment, the GITR agonist can be administered prior to apheresis of the cells. In one embodiment, the subject has CLL. Exemplary GITR agonists include, e.g., GITR fusion proteins and anti-GITR antibodies (e.g., bivalent anti-GITR antibodies) such as, e.g., a GITR fusion protein described in U.S. Pat. No. 6,111,090, European Patent No.: 090505B1, U.S. Pat. No. 8,586,023, PCT Publication Nos.: WO 2010/003118 and 2011/090754, or an anti-GITR antibody described, e.g., in U.S. Pat. No. 7,025,962, European Patent No.: 1947183B1, U.S. Pat. Nos. 7,812,135, 8,388,967, 8,591,886, European Patent No.: EP 1866339, PCT Publication No.: WO 2011/028683, PCT Publication No.:WO 2013/039954, PCT Publication No.: WO2005/007190, PCT Publication No.: WO 2007/133822, PCT Publication No.: WO2005/055808, PCT Publication No.: WO 99/40196, PCT Publication No.: WO 2001/03720, PCT Publication No.: WO99/20758, PCT Publication No.: WO2006/083289, PCT Publication No.: WO 2005/115451, U.S. Pat. No. 7,618,632, and PCT Publication No.: WO 2011/051726.

[0716] In one embodiment, a CAR expressing cell described herein is administered to a subject in combination with an mTOR inhibitor, e.g., an mTOR inhibitor described herein, e.g., a rapalog such as everolimus. In one embodiment, the mTOR inhibitor is administered prior to the CAR-expressing cell. For example, in one embodiment, the mTOR inhibitor can be administered prior to apheresis of the cells. In one embodiment, the subject has CLL.

[0717] In one embodiment, a CAR expressing cell described herein is administered to a subject in combination with a GITR agonist, e.g., a GITR agonist described herein. In one embodiment, the GITR agonist is administered prior to the CAR-expressing cell. For example, in one embodiment, the GITR agonist can be administered prior to apheresis of the cells. In one embodiment, the subject has CLL.

[0718] In one embodiment, a CAR expressing cell described herein is administered to a subject in combination with a protein tyrosine phosphatase inhibitor, e.g., a protein tyrosine phosphatase inhibitor described herein. In one embodiment, the protein tyrosine phosphatase inhibitor is an SHP-1 inhibitor, e.g., an SHP-1 inhibitor described herein, such as, e.g., sodium stibogluconate. In one embodiment, the protein tyrosine phosphatase inhibitor is an SHP-2 inhibitor.

[0719] In one embodiment, a CAR-expressing cell described herein can be used in combination with a kinase inhibitor. In one embodiment, the kinase inhibitor is a CDK4 inhibitor, e.g., a CDK4 inhibitor described herein, e.g., a CDK4/6 inhibitor, such as, e.g., 6-Acetyl-8-cyclopentyl-5-methyl-2-(5-piperazin-1-yl-pyridin-2-ylamino)-8H-pyrido[2,3-d]pyrimidin-7-one, hydrochloride (also referred to as palbociclib or PD0332991). In one embodiment, the kinase inhibitor is a BTK inhibitor, e.g., a BTK inhibitor described herein, such as, e.g., ibrutinib. In one embodiment, the kinase inhibitor is an mTOR inhibitor, e.g., an mTOR inhibitor described herein, such as, e.g., rapamycin, a rapamycin analog, OSI-027. The mTOR inhibitor can be, e.g., an mTORC1 inhibitor and/or an mTORC2 inhibitor, e.g., an mTORC1 inhibitor and/or mTORC2 inhibitor described herein. In one embodiment, the kinase inhibitor is a MNK inhibitor, e.g., a MNK inhibitor described herein, such as, e.g., 4-amino-5-(4-fluoroanilino)-pyrazolo [3,4-d] pyrimidine. The MNK inhibitor can be, e.g., a MNK1a, MNK1b, MNK2a and/or MNK2b inhibitor. In one embodiment, the kinase inhibitor is a dual PI3K/mTOR inhibitor described herein, such as, e.g., PF-04695102.

[0720] In one embodiment, the kinase inhibitor is a CDK4 inhibitor selected from aloisine A; flavopiridol or HMR-1275, 2-(2-chlorophenyl)-5,7-dihydroxy-8-[(3S,4R)-3-hydroxy-1-methyl-4-piperidinyl]-4-chromenone; crizotinib (PF-02341066; 2-(2-Chlorophenyl)-5,7-dihydroxy-8-[(2R,3S)-2-(hydroxymethyl)-1-methyl-3-pyrrolidinyl]-4H-1-benzopyran-4-one, hydrochloride (P276-00); 1-methyl-5-[[2-[5-(trifluoromethyl)-1H-imidazol-2-yl]-4-pyridinyl]oxy]-N-[4-(trifluoromethyl)phenyl]-H-benzimidazol-2-amine (RAF265); indisulam (E7070); roscovitine (CYC202); palbociclib (PD0332991); dinaciclib (SCH727965); N-[5-[[(5-tert-butyloxazol-2-yl)methyl]thio]thiazol-2-yl]piperidine-4-carboxamide (BMS 387032); 4-[[9-chloro-7-(2,6-difluorophenyl)-5H-pyrimido[5,4-d][2]benzazepin-2-yl]amino]-benzoic acid (MLN8054); 5-[3-(4,6-difluoro-1H-benzimidazol-2-yl)-1H-indazol-5-yl]-N-ethyl-4-methyl-3-pyridinemethanamine (AG-024322); 4-(2,6-dichlorobenzoylamino)-1H-pyrazole-3-carboxylic acid N-(piperidin-4-yl)amide (AT7519); 4-[2-methyl-1-(1-methylethyl)-1H-imidazol-5-yl]-N-[4-(methylsulfonyl)phenyl]-2-pyrimidinamine (AZD5438); and XL281 (BMS908662).

[0721] In one embodiment, the kinase inhibitor is a CDK4 inhibitor, e.g., palbociclib (PD0332991), and the palbociclib is administered at a dose of about 50 mg, 60 mg, 70 mg, 75 mg, 80 mg, 90 mg, 100 mg, 105 mg, 110 mg, 115 mg, 120 mg, 125 mg, 130 mg, 135 mg (e.g., 75 mg, 100 mg or 125 mg) daily for a period of time, e.g., daily for 14-21 days of a 28 day cycle, or daily for 7-12 days of a 21 day cycle. In one embodiment, 1, 2, 3, 4, 5, 6, 7, 8, 9, 10, 11, 12 or more cycles of palbociclib are administered.

[0722] In embodiments, a CAR-expressing cell described herein is administered to a subject in combination with a cyclin-dependent kinase (CDK) 4 or 6 inhibitor, e.g., a CDK4 inhibitor or a CDK6 inhibitor described herein. In embodiments, a CAR-expressing cell described herein is administered to a subject in combination with a CDK4/6 inhibitor (e.g., an inhibitor that targets both CDK4 and CDK6), e.g., a CDK4/6 inhibitor described herein. In an embodiment, the subject has MCL. MCL is an aggressive cancer that is poorly responsive to currently available therapies, i.e., essentially incurable. In many cases of MCL, cyclin D1 (a regulator of CDK4/6) is expressed (e.g., due to chromosomal translocation involving immunoglobulin and Cyclin D1 genes) in MCL cells. Thus, without being bound by theory, it is thought that MCL cells are highly sensitive to CDK4/6 inhibition with high specificity (i.e., minimal effect on normal immune cells). CDK4/6 inhibitors alone have had some efficacy in treating MCL, but have only achieved partial remission with a high relapse rate. An exemplary CDK4/6 inhibitor is LEE011 (also called ribociclib), the structure of which is shown below.

[chemical structure]

[0723] Without being bound by theory, it is believed that administration of a CAR-expressing cell described herein with a CDK4/6 inhibitor (e.g., LEE011 or other CDK4/6 inhibitor described herein) can achieve higher responsiveness, e.g., with higher remission rates and/or lower relapse rates, e.g., compared to a CDK4/6 inhibitor alone.

[0724] In one embodiment, the kinase inhibitor is a BTK inhibitor selected from ibrutinib (PCI-32765); GDC-0834; RN-486; CGI-560; CGI-1764; HM-71224; CC-292; ONO-4059; CNX-774; and LFM-A13. In a preferred embodiment, the BTK inhibitor does not reduce or inhibit the kinase activity of interleukin-2-inducible kinase (ITK), and is selected from GDC-0834; RN-486; CGI-560; CGI-1764; HM-71224; CC-292; ONO-4059; CNX-774; and LFM-A13.

[0725] In one embodiment, the kinase inhibitor is a BTK inhibitor, e.g., ibrutinib (PCI-32765). In embodiments, a CAR-expressing cell described herein is administered to a subject in combination with a BTK inhibitor (e.g., ibrutinib). In embodiments, a CAR-expressing cell described herein is administered to a subject in combination with ibrutinib (also called PCI-32765). The structure of ibrutinib (1-[(3R)-3-[4-Amino-3-(4-phenoxyphenyl)-H-pyrazolo[3,4-d]pyrimidin-1-yl]piperidin-1-yl]prop-2-en-1-one) is shown below.

[chemical structure]

[0726] In embodiments, the subject has CLL, mantle cell lymphoma (MCL), or small lymphocytic lymphoma (SLL). For example, the subject has a deletion in the short arm of chromosome 17 (del(17p), e.g., in a leukemic cell). In other examples, the subject does not have a del(17p). In embodiments, the subject has relapsed CLL or SLL, e.g., the subject has previously been administered a cancer therapy (e.g., previously been administered one, two, three, or four prior cancer therapies). In embodiments, the subject has refractory CLL or SLL. In other embodiments, the subject has follicular lymphoma, e.g., relapse or refractory follicular lymphoma. In some embodiments, ibrutinib is administered at a dosage of about 300-600 mg/day (e.g., about 300-350, 350-400, 400-450, 450-500, 500-550, or 550-600 mg/day, e.g., about 420 mg/day or about 560 mg/day), e.g., orally. In embodiments, the ibrutinib is administered at a dose of about 250 mg, 300 mg, 350 mg, 400 mg, 420 mg, 440 mg, 460 mg, 480 mg, 500 mg, 520 mg, 540 mg, 560 mg, 580 mg, 600 mg (e.g., 250 mg, 420 mg or 560 mg) daily for a period of time, e.g., daily for 21 day cycle, or daily for 28 day cycle. In one embodiment, 1, 2, 3, 4, 5, 6, 7, 8, 9, 10, 11, 12 or more cycles of ibrutinib are administered.

[0727] In some embodiments, ibrutinib is administered in combination with rituximab. See, e.g., Burger et al. (2013) Ibrutinib In Combination With Rituximab (iR) Is Well Tolerated and Induces a High Rate Of Durable Remissions In Patients With High-Risk Chronic Lymphocytic Leukemia (CLL): New, Updated Results Of a Phase II Trial In 40 Patients, Abstract 675 presented at 55^{th} ASH Annual Meeting and Exposition, New Orleans, La. 7-10 December Without being bound by theory, it is thought that the addition of ibrutinib enhances the T cell proliferative response and may shift T cells from a T-helper-2 (Th2) to T-helper-1 (Th1) phenotype. Th1 and Th2 are phenotypes of helper T cells, with Th1 versus Th2 directing different immune response pathways. A Th phenotype is associated with proinflammatory responses, e.g., for killing cells, such as intracellular pathogens/viruses or cancerous cells, or perpetuating autoimmune responses. A Th2 phenotype is associated with eosinophil accumulation and anti-inflammatory responses.

[0728] In some embodiments of the methods, uses, and compositions herein, the BTK inhibitor is a BTK inhibitor described in International Application WO/2015/079417, which is herein incorporated by reference in its entirety. For instance, in some embodiments, the BTK inhibitor is a compound of formula (I) or a pharmaceutically acceptable salt thereof;

[chemical structure]

[0729] wherein,

[0730] R1 is hydrogen, C1-C6 alkyl optionally substituted by hydroxy;

[0731] R2 is hydrogen or halogen;

[0732] R3 is hydrogen or halogen;

[0733] R4 is hydrogen;

[0734] R5 is hydrogen or halogen;

[0735] or R4 and R5 are attached to each other and stand for a bond, —CH2-, —CH2-CH2-, —CH═CH—, —CH═CH—CH2-; —CH2-CH═CH—; or —CH2-CH2-CH2-:

[0736] R6 and R7 stand independently from each other for H, C1-C6 alkyl optionally substituted by hydroxyl, C3-C6 cycloalkyl optionally substituted by halogen or hydroxy, or halogen;

[0737] R8, R9, R, R′, R10 and R11 independently from each other stand for H, or C1-C6 alkyl optionally substituted by C1-C6 alkoxy; or any two of R8, R9, R, R′, R10 and R11 together with the carbon atom to which they are bound may form a 3-6 membered saturated carbocyclic ring;

[0738] R12 is hydrogen or C1-C6 alkyl optionally substituted by halogen or C1-C6 alkoxy;

[0739] or R12 and any one of R8, R9, R, R′, R10 or R11 together with the atoms to which they are bound may form a 4, 5, 6 or 7 membered azacyclic ring, which ring may optionally be substituted by halogen, cyano, hydroxyl, C1-C6 alkyl or C1-C6 alkoxy;

[0740] n is 0 or 1; and

[0741] R13 is C2-C6 alkenyl optionally substituted by C1-C6 alkyl, C1-C6 alkoxy or N,N-di-C1-C6 alkyl amino; C2-C6 alkynyl optionally substituted by C1-C6 alkyl or C1-C6 alkoxy; or C2-C6 alkylenyl oxide optionally substituted by C1-C6 alkyl.

[0742] In some embodiments, the BTK inhibitor of Formula I is chosen from: N-(3-(5-((1-Acryloylazetidin-3-yl)oxy)-6-aminopyrimidin-4-yl)-5-fluoro-2-methylphenyl)-4-cyclopropl-2-fluorobenzamide; (E)-N-(3-(6-Amino-5-((1-(but-2-enoyl)azetidin-3-yl)oxy)pyrimidin-4-yl)-5-fluoro-2-methylphenyl)-4-cyclopropyl-2-fluorobenzamide; N-(3-(6-Amino-5-((1-propioloylazetidin-3-yl)oxy)pyrimidin-4-yl)-5-fluoro-2-methylphenyl)-4-cyclopropl-2-fluorobenzamide; N-(3-(6-Amino-5-((1-(but-2-ynoyl)azetidin-3-yl)oxy)pyrimidin-4-yl)-5-fluoro-2-methylphenyl)-4-cyclopropyl-2-fluorobenzamide; N-(3-(5-((1-Acryloylpiperidin-4-yl)oxy)-6-aminopyrimidin-4-yl)-5-fluoro-2-methylphenyl)-4-cyclopropl-2-fluorobenzamide; N-(3-(6-Amino-5-(2-(N-methylacrylamido)ethoxy)pyrimidin-4-yl)-5-fluoro-2-methyl phenyl)-4-cyclopropyl-2-fluorobenzamide; (E)-N-(3-(6-Amino-5-(2-(N-methylbut-2-enamido)ethoxy)pyrimidin-4-yl)-5-fluoro-2-methylphenyl)-4-cyclopropyl-2-fluorobenzamide; N-(3-(6-Amino-5-(2-(N-methylpropiolamido)ethoxy)pyrimidin-4-yl)-5-fluoro-2-methylphenyl)-4-cyclopropyl-2-fluorobenzamide; (E)-N-(3-(6-Amino-5-(2-(4-methoxy-N-methylbut-2-enamido)ethoxy)pyrimidin-4-yl)-5-fluoro-2-methylphenyl)-4-cyclopropyl-2-fluorobenzamide; N-(3-(6-Amino-5-(2-(N-methylbut-2-ynamido)ethoxy)pyrimidin-4-yl)-5-fluoro-2-methylphenyl)-4-cyclopropyl-2-fluorobenzamide; N-(2-((4-Amino-6-(3-(4-cyclopropyl-2-fluorobenzamido)-5-fluoro-2-methylphenyl)pyrimidin-5-yl)oxy)ethyl)-N-methyloxirane-2-carboxamide; N-(2-((4-Amino-6-(3-(6-cyclopropyl-8-fluoro-1-oxoisoquinolin-2(1H)-yl)phenyl)pyrimidin-5-yl)oxy)ethyl)-N-methylacrylamide; N-(3-(5-(2-Acrylamidoethoxy)-6-aminopyrimidin-4-yl)-5-fluoro-2-methylphenyl)-4-cyclopropyl-2-fluorobenzamide; N-(3-(6-Amino-5-(2-(N-ethylacrylamido)ethoxy)pyrimidin-4-yl)-5-fluoro-2-methylphenyl)-4-cyclopropyl-2-fluorobenzamide; N-(3-(6-Amino-5-(2-(N-(2-fluoroethyl)acrylamido)ethoxy)pyrimidin-4-yl)-5-fluoro-2-methylphenyl)-4-cyclopropyl-2-fluorobenzamide; N-(3-(5-((1-Acrylamidocyclopropyl)methoxy)-6-aminopyrimidin-4-yl)-5-fluoro-2-methylphenyl)-4-cyclopropyl-2-fluorobenzamide; (S)-N-(3-(5-(2-Acrylamiidopropoxy)-6-aminopyrimidin-4-yl)-5-fluoro-2-methylphenyl)-4-cyclopropyl-2-fluorobenzamiide; (S)-N-(3-(6-Amino-5-(2-(but-2-ynamido)propoxy)pyrimidin-4-yl)-5-fluoro-2-methylphenyl)-4-cyclopropyl-2-fluorobenzamide; (S)-N-(3-(6-Amino-5-(2-(N-methylacrylamido)propoxy)pyrimidin-4-yl)-5-fluoro-2-methylphenyl)-4-cyclopropyl-2-fluorobenzamiide; (S)-N-(3-(6-Amino-5-(2-(N-methylbut-2-ynamido)propoxy)pyrimidin-4-yl)-5-fluoro-2-methylphenyl)-4-cyclopropyl-2-fluorobenzamide; N-(3-(6-Amino-5-(3-(N-methylacrylamido)propoxy)pyrimidin-4-yl)-5-fluoro-2-methylphenyl)-4-cyclopropl-2-fluorobenzamide; (S)-N-(3-(5-((1-Acryloylpyrrolidin-2-yl)methoxy)-6-aminopyrimidin-4-yl)-5-fluoro-2-methylphenyl)-4-cyclopropyl-2-fluorobenzamide; (S)-N-(3-(6-Amino-5-((1-(but-2-ynoyl)pyrrolidin-2-yl)methoxy)pyrimidin-4-yl)-5-fluoro-2-methylphenyl)-4-cyclopropyl-2-fluorobenzamide; (S)-2-(3-(5-((1-Acryloylpyrrolidin-2-yl)methoxy)-6-aminopyrimidin-4-yl)-5-fluoro-2-(hydroxymethyl)phenyl)-6-cyclopropyl-3,4-dihydroisoquinolin-1(2H)-one; N-(2-((4-Amino-6-(3-(6-cyclopropyl-1-oxo-3,4-dihydroisoquinolin-2(1H)-yl)-5-fluoro-2-(hydroxymethyl)phenyl)pyrimidin-5-yl)oxy)ethyl)-N-methylacrylamide; N-(3-(5-(((2S,4R)-1-Acryloyl-4-methoxypyrrolidin-2-yl)methoxy)-6-aminopyrimidin-4-yl)-5-fluoro-2-methylphenyl)-4-cyclopropyl-2-fluorobenzamide; N-(3-(6-Amino-5-(((2S,4R)-1-(but-2-ynoyl)-4-methoxypyrrolidin-2-yl)methoxy)pyrimidin-4-yl)-5-fluoro-2-methylphenyl)-4-cyclopropyl-2-fluorobenzamide; 2-(3-(5-(((2S,4R)-1-Acryloyl-4-methoxypyrrolidin-2-yl)methoxy)-6-aminopyrimidin-4-yl)-5-fluoro-2-(hydroxymethyl)phenyl)-6-cyclopropyl-3,4-dihydroisoquinolin-1(2H)-one; N-(3-(5-(((2S,4S)-1-Acryloyl-4-methoxypyrrolidin-2-yl)methoxy)-6-aminopyrimidin-4-yl)-5-fluoro-2-methylphenyl)-4-cyclopropyl-2-fluorobenzamide; N-(3-(6-Amino-5-(((2S,4S)-1-(but-2-ynoyl)-4-methoxypyrrolidin-2-yl)methoxy)pyrimidin-4-yl)-5-fluoro-2-methylphenyl)-4-cyclopropyl-2-fluorobenzamide; N-(3-(5-(((2S,4R)-1-Acryloyl-4-fluoropyrrolidin-2-yl)methoxy)-6-aminopyrimidin-4-yl)-5-fluoro-2-methylphenyl)-4-cyclopropyl-2-fluorobenzamide; N-(3-(6-Amino-5-(((2S,4R)-1-(but-2-ynoyl)-4-fluoropyrrolidin-2-yl)methoxy)pyrimidin-4-yl)-5-fluoro-2-methylphenyl)-4-cyclopropyl-2-fluorobenzamide; (S)-N-(3-(5-((1-Acryloylazetidin-2-yl)methoxy)-6-aminopyrimidin-4-yl)-5-fluoro-2-methylphenyl)-4-cyclopropyl-2-fluorobenzamide; (S)-N-(3-(6-Amino-5-((1-propioloylazetidin-2-yl)methoxy)pyrimidin-4-yl)-5-fluoro-2-methylphenyl)-4-cyclopropyl-2-fluorobenzamide; (S)-2-(3-(5-((1-Acryloylazetidin-2-yl)methoxy)-6-aminopyrimidin-4-yl)-5-fluoro-2-(hydro)ylmethyl)phenyl)-6-cyclopropyl-3,4-dihydroisoquinolin-1(2H)-one; (R)-N-(3-(5-((1-Acryloylazetidin-2-yl)methoxy)-6-aminopyrimidin-4-yl)-5-fluoro-2-methylphenyl)-4-cyclopropyl-2-fluorobenzamide; (R)-N-(3-(5-((1-Acryloylpiperidin-3-yl)methoxy)-6-aminopyrimidin-4-yl)-5-fluoro-2-methylphenyl)-4-cyclopropyl-2-fluorobenzamide; N-(3-(5-(((2R,3S)-1-Acryloyl-3-methoxypyrrolidin-2-yl)methoxy)-6-aminopyrimidin-4-yl)-5-fluoro-2-methylphenyl)-4-cyclopropyl-2-fluorobenzamiide; N-(3-(5-(((2S,4R)-1-Acryloyl-4-cyanopyrrolidine-2-yl)methoxy)-6-aminopyrimidin-4-yl)-5-fluoro-2-methylphenyl)-4-cyclopropyl-2-fluorobenzamide; or N-(3-(5-(((2S,4S)-1-Acryloyl-4-cyanopyrrolidin-2-yl)methoxy)-6-aminopyrimidin-4-yl)-5-fluoro-2-methylphenyl)-4-cyclopropyl-2-fluorobenzamide.

[0743] Unless otherwise provided, the chemical terms used above in describing the BTK inhibitor of Formula I are used according to their meanings as set out in International Application WO/2015/079417, which is herein incorporated by reference in its entirety.

[0744] In one embodiment, the kinase inhibitor is an mTOR inhibitor selected from temsirolimus; ridaforolimus (1R,2R,4S)-4-[(2R)-2 [(1R,9S,12S,15R,16E,18R,19R,21R,23S,24E,26E,28Z,30S,32S,35R)-1,18-dihydroxy-19,30-dimethoxy-15,17,21,23, 29,35-hexamethyl-2,3,10,14,20-pentaoxo-11,36-dioxa-4-azatricyclo[30.3.1.0⁴′9] hexatriaconta-16,24,26,28-tetraen-12-yl]propyl]-2-methoxycyclohexyl dimethylphosphinate, also known as AP23573 and MK8669; everolimus (RAD001); rapamycin (AY22989); simapimod; (5-{2,4-bis[(3S)-3-methylmorpholin-4-yl]pyrido[2,3-d]pyrimidin-7-yl}-2-methoxyphenyl)methanol (AZD8055); 2-amino-8-[trans-4-(2-hydroxyethoxy)cyclohexyl]-6-(6-methoxy-3-pyridinyl)-4-methyl-pyrido[2,3-d]pyrimidin-7(8H)-one (PF04691502); and N²-[1,4-dioxo-4-[[4-(4-oxo-8-phenyl-4H-1-benzopyran-2-yl)morpholinium-4-yl]methoxy]butyl]-L-arginylglycyl-L-a-aspartylL-serine-(SEQ ID NO: 264), inner salt (SF1126); and XL765.

[0745] In one embodiment, the kinase inhibitor is an mTOR inhibitor, e.g., rapamycin, and the rapamycin is administered at a dose of about 3 mg, 4 mg, 5 mg, 6 mg, 7 mg, 8 mg, 9 mg, 10 mg (e.g., 6 mg) daily for a period of time, e.g., daily for 21 day cycle, or daily for 28 day cycle. In one embodiment, 1, 2, 3, 4, 5, 6, 7, 8, 9, 10, 11, 12 or more cycles of rapamycin are administered. In one embodiment, the kinase inhibitor is an mTOR inhibitor, e.g., everolimus and the everolimus is administered at a dose of about 2 mg, 2.5 mg, 3 mg, 4 mg, 5 mg, 6 mg, 7 mg, 8 mg, 9 mg, 10 mg, 11 mg, 12 mg, 13 mg, 14 mg, 15 mg (e.g., 10 mg) daily for a period of time, e.g., daily for 28 day cycle. In one embodiment, 1, 2, 3, 4, 5, 6, 7, 8, 9, 10, 11, 12 or more cycles of everolimus are administered.

[0746] In one embodiment, the kinase inhibitor is an MNK inhibitor selected from CGP052088; 4-amino-3-(p-fluorophenylamino)-pyrazolo [3,4-d] pyrimidine (CGP57380); cercosporamide; ETC-1780445-2; and 4-amino-5-(4-fluoroanilino)-pyrazolo [3,4-d]pyrimidine.

[0747] In one embodiment, the kinase inhibitor is a dual phosphatidylinositol 3-kinase (PI3K) and mTOR inhibitor selected from 2-Amino-8-[trans-4-(2-hydroxyethoxy)cyclohexyl]-6-(6-methoxy-3-pyridinyl)-4-methyl-pyrido[2,3-d]pyrimidin-7(8H)-one (PF-04691502); N-[4-[[4-(Dimethylamino)-1-piperidinyl]carbonyl]phenyl]-N-[4-(4,6-di-4-morpholinyl-1,3,5-triazin-2-yl)phenyl]urea (PF-05212384, PKI-587); 2-Methyl-2-{(4-[3-methyl-2-oxo-8-(quinolin-3-yl)-2,3-dihydro-1H-imidazo[4,5-c]quinolin-1-yl]phenyl}propanenitrile (BEZ-235); apitolisib (GDC-0980, RG7422); 2,4-Difluoro-N-{2-(methyloxy)-5-[4-(4-pyridazinyl)-6-quinolinyl]-3-pyridinyl}benzenesulfonamide (GSK2126458); 8-(6-methoxypyridin-3-yl)-3-methyl-1-(4-(piperazin-1-yl)-3-(trifluoromethyl)phenyl)-1H-imidazo[4,5-c]quinolin-2(3H)-one Maleic acid (NVP-BGT226); 3-[4-(4-Morpholinylpyrido[3′,2′:4, 5]furo[3,2-d]pyrimidin-2-yl]phenol (PI-103); 5-(9-isopropyl-8-methyl-2-morpholino-9H-purin-6-yl)pyrimidin-2-amine (VS-5584, SB2343); and N-[2-[(3,5-Dimethoxyphenyl)amino]quinoxalin-3-yl]-4-[(4-methyl-3-methoxyphenyl)carbonyl]aminophenylsulfonamide (XL765).

[0748] In one embodiment, the kinase inhibitor is an mTOR inhibitor, e.g., rapamycin, and the rapamycin is administered at a dose of about 3 mg, 4 mg, 5 mg, 6 mg, 7 mg, 8 mg, 9 mg, 10 mg (e.g., 6 mg) daily for a period of time, e.g., daily for 21 day cycle, or daily for 28 day cycle. In one embodiment, 1, 2, 3, 4, 5, 6, 7, 8, 9, 10, 11, 12 or more cycles of rapamycin are administered. In one embodiment, the kinase inhibitor is an mTOR inhibitor, e.g., everolimus and the everolimus is administered at a dose of about 2 mg, 2.5 mg, 3 mg, 4 mg, 5 mg, 6 mg, 7 mg, 8 mg, 9 mg, 10 mg, 11 mg, 12 mg, 13 mg, 14 mg, 15 mg (e.g., 10 mg) daily for a period of time, e.g., daily for 28 day cycle. In one embodiment, 1, 2, 3, 4, 5, 6, 7, 8, 9, 10, 11, 12 or more cycles of everolimus are administered.

[0749] In one embodiment, the kinase inhibitor is an MNK inhibitor selected from CGP052088; 4-amino-3-(p-fluorophenylamino)-pyrazolo [3,4-d] pyrimidine (CGP57380); cercosporamide; ETC-1780445-2; and 4-amino-5-(4-fluoroanilino)-pyrazolo [3,4-d]pyrimidine.

[0750] In embodiments, a CAR-expressing cell described herein is administered to a subject in combination with a phosphoinositide 3-kinase (PI3K) inhibitor (e.g., a PI3K inhibitor described herein, e.g., idelalisib or duvelisib) and/or rituximab. In embodiments, a CAR-expressing cell described herein is administered to a subject in combination with idelalisib and rituximab. In embodiments, a CAR-expressing cell described herein is administered to a subject in combination with duvelisib and rituximab. Idelalisib (also called GS-1101 or CAL-101; Gilead) is a small molecule that blocks the delta isoform of PI3K. The structure of idelalisib (5-Fluoro-3-phenyl-2-[(1S)-1-(7H-purin-6-ylamino)propyl]-4(3H)-quinazolinone) is shown below.

[chemical structure]

[0751] Duvelisib (also called IPI-145; Infinity Pharmaceuticals and Abbvie) is a small molecule that blocks PI3K-δ,γ. The structure of duvelisib (8-Chloro-2-phenyl-3-[(1S)-1-(9H-purin-6-ylamino)ethyl]-1(2H)-isoquinolinone) is shown below.

[chemical structure]

[0752] In embodiments, the subject has CLL. In embodiments, the subject has relapsed CLL, e.g., the subject has previously been administered a cancer therapy (e.g., previously been administered an anti-CD20 antibody or previously been administered ibrutinib). For example, the subject has a deletion in the short arm of chromosome 17 (del(17p), e.g., in a leukemic cell). In other examples, the subject does not have a del(17p). In embodiments, the subject comprises a leukemic cell comprising a mutation in the immunoglobulin heavy-chain variable-region (IgV_{H}) gene. In other embodiments, the subject does not comprise a leukemic cell comprising a mutation in the immunoglobulin heavy-chain variable-region (IgV_{H}) gene. In embodiments, the subject has a deletion in the long arm of chromosome 11 (del(11q)). In other embodiments, the subject does not have a del(11q). In embodiments, idelalisib is administered at a dosage of about 100-400 mg (e.g., 100-125, 125-150, 150-175, 175-200, 200-225, 225-250, 250-275, 275-300, 325-350, 350-375, or 375-400 mg), e.g., BID. In embodiments, duvelisib is administered at a dosage of about 15-100 mg (e.g., about 15-25, 25-50, 50-75, or 75-100 mg), e.g., twice a day. In embodiments, rituximab is administered at a dosage of about 350-550 mg/m² (e.g., 350-375, 375-400, 400-425, 425-450, 450-475, or 475-500 mg/m²), e.g., intravenously.

[0753] In one embodiment, the kinase inhibitor is a dual phosphatidylinositol 3-kinase (PI3K) and mTOR inhibitor selected from 2-Amino-8-[trans-4-(2-hydroxyethoxy)cyclohexyl]-6-(6-methoxy-3-pyridinyl)-4-methyl-pyrido[2,3-d]pyrimidin-7(8H)-one (PF-04691502); N-[4-[[4-(Dimethylamino)-1-piperidinyl]carbonyl]phenyl]-N-[4-(4,6-di-4-morpholinyl-1,3,5-triazin-2-yl)phenyl]urea (PF-05212384, PKI-587); 2-Methyl-2-{(4-[3-methyl-2-oxo-8-(quinolin-3-yl)-2,3-dihydro-1H-imidazo[4,5-c]quinolin-1-yl]phenyl}propanenitrile (BEZ-235); apitolisib (GDC-0980, RG7422); 2,4-Difluoro-N-{2-(methyloxy)-5-[4-(4-pyridazinyl)-6-quinolinyl]-3-pyridinyl}benzenesulfonamide (GSK2126458); 8-(6-methoxypyridin-3-yl)-3-methyl-1-(4-(piperazin-1-yl)-3-(trifluoromethyl)phenyl)-1H-imidazo[4,5-c]quinolin-2(3H)-one Maleic acid (NVP-BGT226); 3-[4-(4-Morpholinylpyrido[3′,2′:4,5]furo[3,2-d]pyrimidin-2-yl]phenol (PI-103); 5-(9-isopropyl-8-methyl-2-morpholino-9H-purin-6-yl)pyrimidin-2-amine (VS-5584, SB2343); and N-[2-[(3,5-Dimethoxyphenyl)amino]quinoxalin-3-yl]-4-[(4-methyl-3-methoxyphenyl)carbonyl]aminophenylsulfonamide (XL765).

[0754] In embodiments, a CAR-expressing cell described herein is administered to a subject in combination with an anaplastic lymphoma kinase (ALK) inhibitor. Exemplary ALK kinases include but are not limited to crizotinib (Pfizer), ceritinib (Novartis), alectinib (Chugai), brigatinib (also called AP26113: Ariad), entrectinib (Ignyta), PF-06463922 (Pfizer), TSR-O11 (Tesaro) (see, e.g., Clinical Trial Identifier No. NCT02048488), CEP-37440 (Teva), and X-396 (Xcovery). In some embodiments, the subject has a solid cancer, e.g., a solid cancer described herein, e.g., lung cancer.

[0755] The chemical name of crizotinib is 3-[(1R)-1-(2,6-dichloro-3-fluorophenyl)ethoxy]-5-(1-piperidin-4-ylpyrazol-4-yl)pyridin-2-amine. The chemical name of ceritinib is 5-Chloro-N²-[2-isopropoxy-5-methyl-4-(4-piperidinyl)phenyl]-N-[2-(isopropylsulfonyl)phenyl]-2,4-pyrimidinediamine. The chemical name of alectinib is 9-ethyl-6,6-dimethyl-8-(4-morpholinopiperidin-1-yl)-11-oxo-6, 11-dihydro-5H-benzo[b]carbazole-3-carbonitrile. The chemical name of brigatinib is 5-Chloro-N²-{4-[4-(dimethylamino)-1-piperidinyl]-2-methoxyphenyl}-N⁴-[2-(dimethylphosphoryl)phenyl]-2,4-pyrimidinediamine. The chemical name of entrectinib is N-(5-(3,5-difluorobenzyl)-1H-indazol-3-yl)-4-(4-methylpiperazin-1-yl)-2-((tetrahydro-2H-pyran-4-yl)amino)benzamide. The chemical name of PF-06463922 is (10R)-7-Amino-12-fluoro-2,10,16-trimethyl-15-oxo-10,15,16,17-tetrahydro-2H-8,4-(metheno)pyrazolo[4,3-h][2,5,11]-benzoxadiazacyclotetradecine-3-carbonitrile. The chemical structure of CEP-37440 is (S)-2-((5-chloro-2-((6-(4-(2-hydroxyethyl)piperazin-1-yl)-1-methoxy-6,7,8,9-tetrahydro-5H-benzo[7]annulen-2-yl)amino)pyrimidin-4-yl)amino)-N-methylbenzamide. The chemical name of X-396 is (R)-6-amino-5-(1-(2,6-dichloro-3-fluorophenyl)ethoxy)-N-(4-(4-methylpiperazine-1-carbonyl)phenyl)pyridazine-3-carboxamide. Drugs that inhibit either the calcium dependent phosphatase calcineurin (cyclosporine and FK506) or inhibit the p70S6 kinase that is important for growth factor induced signaling (rapamycin). (Liu et al., Cell 66:807-815, 1991; Henderson et al., Immun. 73:316-321, 1991; Bierer et al., Curr. Opin. Immun. 5:763-773, 1993) can also be used. In a further aspect, the cell compositions of the present disclosure may be administered to a patient in conjunction with (e.g., before, simultaneously or following) bone marrow transplantation, T cell ablative therapy using chemotherapy agents such as, fludarabine, external-beam radiation therapy (XRT), cyclophosphamide, and/or antibodies such as OKT3 or CAMPATH. In one aspect, the cell compositions of the present disclosure are administered following B-cell ablative therapy such as agents that react with CD20, e.g., Rituxan. For example, in one embodiment, subjects may undergo standard treatment with high dose chemotherapy followed by peripheral blood stem cell transplantation. In certain embodiments, following the transplant, subjects receive an infusion of the expanded immune cells of the present disclosure. In an additional embodiment, expanded cells are administered before or following surgery.

[0756] In embodiments, a CAR-expressing cell described herein is administered to a subject in combination with an indoleamine 2,3-dioxygenase (IDO) inhibitor. IDO is an enzyme that catalyzes the degradation of the amino acid, L-tryptophan, to kynurenine. Many cancers overexpress IDO, e.g., prostatic, colorectal, pancreatic, cervical, gastric, ovarian, head, and lung cancer. pDCs, macrophages, and dendritic cells (DCs) can express IDO. Without being bound by theory, it is thought that a decrease in L-tryptophan (e.g., catalyzed by IDO) results in an immunosuppressive milieu by inducing T-cell anergy and apoptosis. Thus, without being bound by theory, it is thought that an IDO inhibitor can enhance the efficacy of a CAR-expressing cell described herein, e.g., by decreasing the suppression or death of a CAR-expressing immune cell. In embodiments, the subject has a solid tumor, e.g., a solid tumor described herein, e.g., prostatic, colorectal, pancreatic, cervical, gastric, ovarian, head, or lung cancer. Exemplary inhibitors of IDO include but are not limited to 1-methyl-tryptophan, indoximod (NewLink Genetics) (see, e.g., Clinical Trial Identifier Nos. NCT01191216; NCTO1792050), and INCB024360 (Incyte Corp.) (see, e.g., Clinical Trial Identifier Nos. NCT01604889; NCT01685255)

[0757] In embodiments, a CAR-expressing cell described herein is administered to a subject in combination with a modulator of myeloid-derived suppressor cells (MDSCs). MDSCs accumulate in the periphery and at the tumor site of many solid tumors. These cells suppress T cell responses, thereby hindering the efficacy of CAR-expressing cell therapy. Without being bound by theory, it is thought that administration of a MDSC modulator enhances the efficacy of a CAR-expressing cell described herein. In an embodiment, the subject has a solid tumor, e.g., a solid tumor described herein, e.g., glioblastoma. Exemplary modulators of MDSCs include but are not limited to MCS110 and BLZ945. MCS110 is a monoclonal antibody (mAb) against macrophage colony-stimulating factor (M-CSF). See, e.g., Clinical Trial Identifier No. NCT00757757. BLZ945 is a small molecule inhibitor of colony stimulating factor 1 receptor (CSFIR). See, e.g., Pyonteck et al. Nat. Med. 19(2013):1264-72. The structure of BLZ945 is shown below.

[chemical structure]

[0758] In embodiments, a CAR-expressing cell described herein is administered to a subject in combination with an agent that inhibits or reduces the activity of immunosuppressive plasma cells. Immunosuppressive plasma cells have been shown to impede T cell-dependent immunogenic chemotherapy, such as oxaliplatin (Shalapour et al., Nature 2015, 521:94-101). In an embodiment, immunosuppressive plasma cells can express one or more of IgA, interleukin (IL)-10, and PD-L1. In an embodiment, the agent is a CD19 CAR-expressing cell or a BCMA CAR-expressing cell.

[0759] In some embodiments, a CAR-expressing cell described herein is administered to a subject in combination with a interleukin-15 (IL-15) polypeptide, a interleukin-15 receptor alpha (IL-15Ra) polypeptide, or a combination of both a IL-15 polypeptide and a IL-15Ra polypeptide e.g., hetIL-15 (Admune Therapeutics, LLC). hetIL-15 is a heterodimeric non-covalent complex of IL-15 and IL-15Ra. hetIL-15 is described in, e.g., U.S. Pat. No. 8,124,084, U.S. 2012/0177598, U.S. 2009/0082299, U.S. 2012/0141413, and U.S. 2011/0081311, incorporated herein by reference. In embodiments, het-IL-15 is administered subcutaneously. In embodiments, the subject has a cancer, e.g., solid cancer, e.g., melanoma or colon cancer. In embodiments, the subject has a metastatic cancer.

[0760] In embodiments, a subject having a disease described herein, e.g., a hematological disorder, e.g., AML or MDS, is administered a CAR-expressing cell described herein in combination with an agent, e.g., cytotoxic or chemotherapy agent, a biologic therapy (e.g., antibody, e.g., monoclonal antibody, or cellular therapy), or an inhibitor (e.g., kinase inhibitor). In embodiments, the subject is administered a CAR-expressing cell described herein in combination with a cytotoxic agent, e.g., CPX-351 (Celator Pharmaceuticals), cytarabine, daunorubicin, vosaroxin (Sunesis Pharmaceuticals), sapacitabine (Cyclacel Pharmaceuticals), idarubicin, or mitoxantrone. CPX-351 is a liposomal formulation comprising cytarabine and daunorubicin at a 5:1 molar ratio. In embodiments, the subject is administered a CAR-expressing cell described herein in combination with a hypomethylating agent, e.g., a DNA methyltransferase inhibitor, e.g., azacitidine or decitabine. In embodiments, the subject is administered a CAR-expressing cell described herein in combination with a biologic therapy, e.g., an antibody or cellular therapy, e.g., 225Ac-lintuzumab (Actimab-A: Actinium Pharmaceuticals), IPH2102 (Innate Pharma/Bristol Myers Squibb), SGN-CD33A (Seattle Genetics), or gemtuzumab ozogamicin (Mylotarg; Pfizer). SGN-CD33A is an antibody-drug conjugate (ADC) comprising a pyrrolobenzodiazepine dimer that is attached to an anti-CD33 antibody. Actimab-A is an anti-CD33 antibody (lintuzumab) labeled with actinium. IPH2102 is a monoclonal antibody that targets killer immunoglobulin-like receptors (KIRs). In embodiments, the subject is administered a CAR-expressing cell described herein in combination a FLT3 inhibitor, e.g., sorafenib (Bayer), midostaurin (Novartis), quizartinib (Daiichi Sankyo), crenolanib (Arog Pharmaceuticals), PLX3397 (Daiichi Sankyo), AKN-028 (Akinion Pharmaceuticals), or ASP2215 (Astellas). In embodiments, the subject is administered a CAR-expressing cell described herein in combination with an isocitrate dehydrogenase (IDH) inhibitor, e.g., AG-221 (Celgene/Agios) or AG-120 (Agios/Celgene). In embodiments, the subject is administered a CAR-expressing cell described herein in combination with a cell cycle regulator, e.g., inhibitor of polo-like kinase 1 (Plk1), e.g., volasertib (Boehringer Ingelheim); or an inhibitor of cyclin-dependent kinase 9 (Cdk9), e.g., alvocidib (Tolero Pharmaceuticals/Sanofi Aventis). In embodiments, the subject is administered a CAR-expressing cell described herein in combination with a B cell receptor signaling network inhibitor, e.g., an inihibitor of B-cell lymphoma 2 (Bcl-2), e.g., venetoclax (Abbvie/Roche); or an inhibitor of Bruton's tyrosine kinase (Btk), e.g., ibrutinib (Pharmacyclics/Johnson & Johnson Janssen Pharmaceutical). In embodiments, the subject is administered a CAR-expressing cell described herein in combination with an inhibitor of M1 aminopeptidase, e.g., tosedostat (CTI BioPharma/Vernalis); an inhibitor of histone deacetylase (HDAC), e.g., pracinostat (MEI Pharma); a multi-kinase inhibitor, e.g., rigosertib (Onconova Therapeutics/Baxter/SymBio); or a peptidic CXCR4 inverse agonist, e.g., BL-8040 (BioLineRx).

[0761] In another embodiment, the subjects receive an infusion of the CAR-expressing cell of the invention, or compositions of the present invention, prior to transplantation, e.g., allogeneic stem cell transplant, of cells. In a preferred embodiment, CAR expressing cells transiently express BCA CAR and/or TA CAR, e.g., by electroporation of an mRNA encoding a BCA CAR and/or TA CAR, whereby the expression of either or both CARs is terminated prior to infusion of donor stem cells to avoid engraftment failure.

[0762] Some patients may experience allergic reactions to the compounds of the present disclosure and/or other anti-cancer agent(s) during or after administration; therefore, anti-allergic agents are often administered to minimize the risk of an allergic reaction. Suitable anti-allergic agents include corticosteroids, such as dexamethasone (e.g., Decadron®), beclomethasone (e.g., Beclovent®), hydrocortisone (also known as cortisone, hydrocortisone sodium succinate, hydrocortisone sodium phosphate, and sold under the tradenames Ala-Cort®, hydrocortisone phosphate, Solu-Cortef®, Hydrocort Acetate® and Lanacort®), prednisolone (sold under the tradenames Delta-Cortel®, Orapred®, Pediapred® and Prelone®), prednisone (sold under the tradenames Deltasone®, Liquid Red®, Meticorten® and Orasone®), methylprednisolone (also known as 6-methylprednisolone, methylprednisolone acetate, methylprednisolone sodium succinate, sold under the tradenames Duralone®, Medralone®, Medrol®, M-Prednisol® and Solu-Medrol®); antihistamines, such as diphenhydramine (e.g., Benadryl®), hydroxyzine, and cyproheptadine; and bronchodilators, such as the beta-adrenergic receptor agonists, albuterol (e.g., Proventil®), and terbutaline (Brethine®). Some patients may experience nausea during and after administration of the compound of the present disclosure and/or other anti-cancer agent(s); therefore, anti-emetics are used in preventing nausea (upper stomach) and vomiting. Suitable anti-emetics include aprepitant (Emend®), ondansetron (Zofran®), granisetron HCl (Kytril®), lorazepam (Ativan®. dexamethasone (Decadron®), prochlorperazine (Compazine®), casopitant (Rezonic® and Zunrisa®), and combinations thereof.

[0763] Medication to alleviate the pain experienced during the treatment period is often prescribed to make the patient more comfortable. Common over-the-counter analgesics, such Tylenol®, are often used. However, opioid analgesic drugs such as hydrocodone/paracetamol or hydrocodone/acetaminophen (e.g., Vicodin®), morphine (e.g., Astramorph® or Avinza®), oxycodone (e.g., OxyContin® or Percocet®), oxymorphone hydrochloride (Opana®), and fentanyl (e.g., Duragesic®) are also useful for moderate or severe pain.

[0764] In an effort to protect normal cells from treatment toxicity and to limit organ toxicities, cytoprotective agents (such as neuroprotectants, free-radical scavengers, cardioprotectors, anthracycline extravasation neutralizers, nutrients and the like) may be used as an adjunct therapy. Suitable cytoprotective agents include Amifostine (Ethyol®), glutamine, dimesna (Tavocept®), mesna (Mesnex®), dexrazoxane (Zinecard® or Totect®), xaliproden (Xaprila®), and leucovorin (also known as calcium leucovorin, citrovorum factor and folinic acid). The structure of the active compounds identified by code numbers, generic or trade names may be taken from the actual edition of the standard compendium “The Merck Index” or from databases, e.g. Patents International (e.g. IMS World Publications).

[0765] The above-mentioned compounds, which can be used in combination with a compound of the present disclosure, can be prepared and administered as described in the art, such as in the documents cited above.

[0766] In one embodiment, the present disclosure provides pharmaceutical compositions comprising at least one compound of the present disclosure (e.g., a compound of the present disclosure) or a pharmaceutically acceptable salt thereof together with a pharmaceutically acceptable carrier suitable for administration to a human or animal subject, either alone or together with other anti-cancer agents.

[0767] In one embodiment, the present disclosure provides methods of treating human or animal subjects suffering from a cellular proliferative disease, such as cancer. The present disclosure provides methods of treating a human or animal subject in need of such treatment, comprising administering to the subject a therapeutically effective amount of a compound of the present disclosure (e.g., a compound of the present disclosure) or a pharmaceutically acceptable salt thereof, either alone or in combination with other anti-cancer agents.

[0768] In particular, compositions will either be formulated together as a combination therapeutic or administered separately.

[0769] In combination therapy, the compound of the present disclosure and other anti-cancer agent(s) may be administered either simultaneously, concurrently or sequentially with no specific time limits, wherein such administration provides therapeutically effective levels of the two compounds in the body of the patient.

[0770] In a preferred embodiment, the compound of the present disclosure and the other anti-cancer agent(s) is generally administered sequentially in any order by infusion or orally. The dosing regimen may vary depending upon the stage of the disease, physical fitness of the patient, safety profiles of the individual drugs, and tolerance of the individual drugs, as well as other criteria well-known to the attending physician and medical practitioner(s) administering the combination. The compound of the present disclosure and other anti-cancer agent(s) may be administered within minutes of each other, hours, days, or even weeks apart depending upon the particular cycle being used for treatment. In addition, the cycle could include administration of one drug more often than the other during the treatment cycle and at different doses per administration of the drug.

[0771] In another aspect of the present disclosure, kits that include one or more compound of the present disclosure and a combination partner as disclosed herein are provided. Representative kits include (a) a compound of the present disclosure or a pharmaceutically acceptable salt thereof, (b) at least one combination partner, e.g., as indicated above, whereby such kit may comprise a package insert or other labeling including directions for administration.

[0772] A compound of the present disclosure may also be used to advantage in combination with known therapeutic processes, for example, the administration of hormones or especially radiation. A compound of the present disclosure may in particular be used as a radiosensitizer, especially for the treatment of tumors which exhibit poor sensitivity to radiotherapy. In one embodiment, the subject can be administered an agent which reduces or ameliorates a side effect associated with the administration of a CAR-expressing cell. Side effects associated with the administration of a CAR-expressing cell include, but are not limited to CRS, and hemophagocytic lymphohistiocytosis (HLH), also termed Macrophage Activation Syndrome (MAS). Symptoms of CRS include high fevers, nausea, transient hypotension, hypoxia, and the like. CRS may include clinical constitutional signs and symptoms such as fever, fatigue, anorexia, myalgias, arthalgias, nausea, vomiting, and headache. CRS may include clinical skin signs and symptoms such as rash. CRS may include clinical gastrointestinal signs and symptoms such as nausea, vomiting and diarrhea. CRS may include clinical respiratory signs and symptoms such as tachypnea and hypoxemia. CRS may include clinical cardiovascular signs and symptoms such as tachycardia, widened pulse pressure, hypotension, increased cardac output (early) and potentially diminished cardiac output (late). CRS may include clinical coagulation signs and symptoms such as elevated d-dimer, hypofibrinogenemia with or without bleeding. CRS may include clinical renal signs and symptoms such as azotemia. CRS may include clinical hepatic signs and symptoms such as transaminitis and hyperbilirubinemia. CRS may include clinical neurologic signs and symptoms such as headache, mental status changes, confusion, delirium, word finding difficulty or frank aphasia, hallucinations, tremor, dymetria, altered gait, and seizures.

[0773] Accordingly, the methods described herein can comprise administering a CAR-expressing cell described herein to a subject and further administering one or more agents to manage elevated levels of a soluble factor resulting from treatment with a CAR-expressing cell. In one embodiment, the soluble factor elevated in the subject is one or more of IFN-γ, TNFα, IL-2 and IL-6. In an embodiment, the factor elevated in the subject is one or more of IL-1, GM-CSF, IL-10, IL-8, IL-5 and fraktalkine. Therefore, an agent administered to treat this side effect can be an agent that neutralizes one or more of these soluble factors. In one embodiment, the agent that neutralizes one or more of these soluble forms is an antibody or antigen binding fragment thereof. Examples of such agents include, but are not limited to a steroid (e.g., corticosteroid), an inhibitor of TNFα, and an inhibitor of IL-6. An example of a TNFα inhibitor is an anti-TNFα antibody molecule such as, infliximab, adalimumab, certolizumab pegol, and golimumab. Another example of a TNFα inhibitor is a fusion protein such as entanercept. Small molecule inhibitor of TNFα include, but are not limited to, xanthine derivatives (e.g. pentoxifylline) and bupropion. An example of an IL-6 inhibitor is an anti-IL-6 antibody molecule such as tocilizumab (toc), sarilumab, elsilimomab, CNTO 328, ALD518/BMS-945429, CNTO 136, CPSI-2364, CDP6038, VX30, ARGX-109, FE301, and FM101. In one embodiment, the anti-IL-6 antibody molecule is tocilizumab. An example of an IL-1R based inhibitor is anakinra.

[0774] In some embodiment, the subject is administered a corticosteroid, such as, e.g., methylprednisolone, hydrocortisone, among others.

[0775] In some embodiments, the subject is administered a vasopressor, such as, e.g., norepinephrine, dopamine, phenylephrine, epinephrine, vasopressin, or a combination thereof.

[0776] In an embodiment, the subject can be administered an antipyretic agent. In an embodiment, the subject can be administered an analgesic agent.

[0777] In one embodiment, the subject can be administered an agent which enhances the activity or fitness of a CAR-expressing cell. For example, in one embodiment, the agent can be an agent which inhibits a molecule that modulates or regulates, e.g., inhibits, T cell function. In some embodiments, the molecule that modulates or regulates T cell function is an inhibitory molecule. Inhibitory molecules, e.g., Programmed Death 1 (PD-1), can, in some embodiments, decrease the ability of a CAR-expressing cell to mount an immune effector response. Examples of inhibitory molecules include PD-1, PD-L1, CTLA4, TIM3, CEACAM (e.g., CEACAM-1, CEACAM-3 and/or CEACAM-5), LAG3, VISTA, BTLA, TIGIT, LAIR1, CD160, 2B4, CD80, CD86, B7-H3 (CD276), B7-H4 (VTCN1), HVEM (TNFRSF14 or CD270), KIR, A2aR. MHC class I, MHC class II, GAL9, adenosine, and TGF beta. Inhibition of a molecule that modulates or regulates, e.g., inhibits, T cell function, e.g., by inhibition at the DNA, RNA or protein level, can optimize a CAR-expressing cell performance. In embodiments, an agent, e.g., an inhibitory nucleic acid, e.g., an inhibitory nucleic acid, e.g., an inhibitory nucleic acid, e.g., a dsRNA, e.g., an siRNA or shRNA, a clustered regularly interspaced short palindromic repeats (CRISPR), a transcription-activator like effector nuclease (TALEN), or a zinc finger endonuclease (ZFN), e.g., as described herein, can be used to inhibit expression of an inhibitory molecule in the CAR-expressing cell. In an embodiment, the inhibitor is an shRNA.

[0778] In an embodiment, the agent that modulates or regulates, e.g., inhibits, T-cell function is inhibited within a CAR-expressing cell. In these embodiments, a dsRNA molecule that inhibits expression of a molecule that modulates or regulates, e.g., inhibits, T-cell function is linked to the nucleic acid that encodes a component, e.g., all of the components, of the CAR In an embodiment, a nucleic acid molecule that encodes a dsRNA molecule that inhibits expression of the molecule that modulates or regulates, e.g., inhibits, T-cell function is operably linked to a promoter, e.g., a H1- or a U6-derived promoter such that the dsRNA molecule that inhibits expression of the molecule that modulates or regulates, e.g., inhibits, T-cell function is expressed, e.g., is expressed within a CAR-expressing cell. See e.g., Tiscornia G., “Development of Lentiviral Vectors Expressing siRNA,” Chapter 3, in Gene Transfer: Delivery and Expression of DNA and RNA (eds. Friedmann and Rossi). Cold Spring Harbor Laboratory Press, Cold Spring Harbor, N.Y., USA, 2007, Brummelkamp T R, et al. (2002) Science 296: 550-553; Miyagishi M, et al. (2002) Nat. Biotechnol. 19: 497-500. In an embodiment the nucleic acid molecule that encodes a dsRNA molecule that inhibits expression of the molecule that modulates or regulates, e.g., inhibits, T-cell function is present on the same vector, e.g., a lentiviral vector, that comprises a nucleic acid molecule that encodes a component, e.g., all of the components, of the CAR In such an embodiment, the nucleic acid molecule that encodes a dsRNA molecule that inhibits expression of the molecule that modulates or regulates, e.g., inhibits, T-cell function is located on the vector, e.g., the lentiviral vector, 5′- or 3′- to the nucleic acid that encodes a component, e.g., all of the components, of the CAR. The nucleic acid molecule that encodes a dsRNA molecule that inhibits expression of the molecule that modulates or regulates, e.g., inhibits, T-cell function can be transcribed in the same or different direction as the nucleic acid that encodes a component, e.g., all of the components, of the CAR In an embodiment the nucleic acid molecule that encodes a dsRNA molecule that inhibits expression of the molecule that modulates or regulates, e.g., inhibits, T-cell function is present on a vector other than the vector that comprises a nucleic acid molecule that encodes a component, e.g., all of the components, of the CAR. In an embodiment, the nucleic acid molecule that encodes a dsRNA molecule that inhibits expression of the molecule that modulates or regulates, e.g., inhibits, T-cell function it transiently expressed within a CAR-expressing cell. In an embodiment, the nucleic acid molecule that encodes a dsRNA molecule that inhibits expression of the molecule that modulates or regulates, e.g., inhibits, T-cell function is stably integrated into the genome of a CAR-expressing cell. Configurations of exemplary vectors for expressing a component, e.g., all of the components, of the CAR with a dsRNA molecule that inhibits expression of the molecule that modulates or regulates, e.g., inhibits, T-cell function, is provided, e.g., in FIG. 47 of International Publication WO2015/090230, filed Dec. 19, 2014, which is herein incorporated by reference. Examples of dsRNA molecules useful for inhibiting expression of a molecule that modulates or regulates, e.g., inhibits, T-cell function, wherein the molecule that modulates or regulates, e.g., inhibits, T-cell function is PD-1 include RNAi agents that target PD-1, as described, e.g., in paragraph [00489] and Tables 16 and 17 of International Publication WO2015/090230, filed Dec. 19, 2014, which is incorporated by reference in its entirety.

[0779] In one embodiment, the agent that modulates or regulates, e.g., inhibits, T-cell function can be, e.g., an antibody or antibody fragment that binds to an inhibitory molecule. For example, the agent can be an antibody or antibody fragment that binds to PD-1, PD-L, PD-L2 or CTLA4 (e.g., ipilimumab (also referred to as MDX-010 and MDX-101, and marketed as Yervoy®; Bristol-Myers Squibb; Tremelimumab (IgG2 monoclonal antibody available from Pfizer, formerly known as ticilimumab, CP-675,206).). In an embodiment, the agent is an antibody or antibody fragment that binds to TIM3. In an embodiment, the agent is an antibody or antibody fragment that binds to LAG3.

[0780] PD-1 is an inhibitory member of the CD28 family of receptors that also includes CD28, CTLA-4, ICOS, and BTLA. PD-1 is expressed on activated B cells, T cells and myeloid cells (Agata et al. 1996 Int. Immunol 8:765-75). Two ligands for PD-1, PD-L1 and PD-L2 have been shown to downregulate T cell activation upon binding to PD-1 (Freeman et a. 2000 J Exp Med 192:1027-34; Latchman et al. 2001 Nat Immunol 2:261-8; Carter et al. 2002 Eur J Immunol 32:634-43). PD-L is abundant in human cancers (Dong et al. 2003 J Mol Med 81:281-7; Blank et al. 2005 Cancer Immunol. Immunother 54:307-314; Konishi et al. 2004 Clin Cancer Res 10:5094). Immune suppression can be reversed by inhibiting the local interaction of PD-1 with PD-L1. Antibodies, antibody fragments, and other inhibitors of PD-1, PD-L1 and PD-L2 are available in the art and may be used combination with a cars of the present disclosure described herein. For example, nivolumab (also referred to as BMS-936558 or MDX1106; Bristol-Myers Squibb) is a fully human IgG4 monoclonal antibody which specifically blocks PD-1. Nivolumab (clone 5C4) and other human monoclonal antibodies that specifically bind to PD-1 are disclosed in U.S. Pat. No. 8,008,449 and WO2006/121168. Pidilizumab (CT-011; Cure Tech) is a humanized IgG1k monoclonal antibody that binds to PD-1. Pidilizumab and other humanized anti-PD-1 monoclonal antibodies are disclosed in WO2009/101611. Pembrolizumab (formerly known as lambrolizumab, and also referred to as MK03475; Merck) is a humanized IgG4 monoclonal antibody that binds to PD-1. Pembrolizumab and other humanized anti-PD-1 antibodies are disclosed in U.S. Pat. No. 8,354,509 and WO2009/114335. MEDI4736 (Medimmune) is a human monoclonal antibody that binds to PDL1, and inhibits interaction of the ligand with PD1. MDPL3280A (Genentech/Roche) is a human Fc optimized IgG1 monoclonal antibody that binds to PD-L1. MDPL3280A and other human monoclonal antibodies to PD-L1 are disclosed in U.S. Pat. No. 7,943,743 and U.S Publication No.: 20120039906. Other anti-PD-L1 binding agents include YW243.55.S70 (heavy and light chain variable regions are shown in SEQ ID NOs 20 and 21 in WO2010/077634) and MDX-1 105 (also referred to as BMS-936559, and, e.g., anti-PD-L1 binding agents disclosed in WO2007/005874). AMP-224 (B7-DCIg; Amplimmune; e.g., disclosed in WO2010/027827 and WO2011/066342), is a PD-L2 Fc fusion soluble receptor that blocks the interaction between PD-1 and B7-H1. Other anti-PD-1 antibodies include AMP 514 (Amplimmune), among others, e.g., anti-PD-1 antibodies disclosed in U.S. Pat. No. 8,609,089, US 2010028330, and/or US 20120114649.

[0781] In one embodiment, the anti-PD-1 antibody or fragment thereof is an anti-PD-1 antibody molecule as described in US 2015/0210769, entitled “Antibody Molecules to PD-1 and Uses Thereof,” incorporated by reference in its entirety. In one embodiment, the anti-PD-1 antibody molecule includes at least one, two, three, four, five or six CDRs (or collectively all of the CDRs) from a heavy and light chain variable region from an antibody chosen from any of BAP049-hum01, BAP049-hum02, BAP049-hum03, BAP049-hum04, BAP049-hum05, BAP049-hum06, BAP049-hum07, BAP049-hum08, BAP049-hum09, BAP049-hum10, BAP049-hum 1, BAP049-hum 12, BAP049-hum 13, BAP049-hum 14, BAP049-hum 15, BAP049-hum16, BAP049-Clone-A, BAP049-Clone-B, BAP049-Clone-C, BAP049-Clone-D, or BAP049-Clone-E; or as described in Table 1 of US 2015/0210769, or encoded by the nucleotide sequence in Table 1, or a sequence substantially identical (e.g., at least 80%, 85%, 90%, 92%, 95%, 97%, 98%, 99° % or higher identical) to any of the aforesaid sequences; or closely related CDRs, e.g., CDRs which are identical or which have at least one amino acid alteration, but not more than two, three or four alterations (e.g., substitutions, deletions, or insertions, e.g., conservative substitutions).

[0782] In yet another embodiment, the anti-PD-1 antibody molecule comprises at least one, two, three or four variable regions from an antibody described herein, e.g., an antibody chosen from any of BAP049-hum01, BAP049-hum02, BAP049-hum03, BAP049-hum04, BAP049-hum05, BAP049-hum06, BAP049-hum07, BAP049-hum08, BAP049-hum09, BAP049-hum 10, BAP049-hum11, BAP049-hum 12, BAP049-hum 13, BAP049-hum14, BAP049-hum15, BAP049-hum16, BAP049-Clone-A, BAP049-Clone-B, BAP049-Clone-C, BAP049-Clone-D, or BAP049-Clone-E; or as described in Table 1 of US 2015/0210769, or encoded by the nucleotide sequence in Table 1; or a sequence substantially identical (e.g., at least 80%/0, 85%, 90%/a, 92%, 95%, 97%, 98%, 99% or higher identical) to any of the aforesaid sequences.

[0783] TIM3 (T cell immunoglobulin-3) also negatively regulates T cell function, particularly in IFN-g-secreting CD4+T helper 1 and CD8+T cytotoxic 1 cells, and plays a critical role in T cell exhaustion. Inhibition of the interaction between TIM3 and its ligands, e.g., galectin-9 (Gal9), phosphotidylserine (PS), and HMGB1, can increase immune response. Antibodies, antibody fragments, and other inhibitors of TIM3 and its ligands are available in the art and may be used combination with a CD19 CAR described herein. For example, antibodies, antibody fragments, small molecules, or peptide inhibitors that target TIM3 binds to the IgV domain of TIM3 to inhibit interaction with its ligands. Antibodies and peptides that inhibit TIM3 are disclosed in WO2013/006490 and US20100247521. Other anti-TIM3 antibodies include humanized versions of RMT3-23 (disclosed in Ngiow et al., 2011, Cancer Res, 71:3540-3551), and clone 8B.2C12 (disclosed in Monney et al., 2002, Nature, 415:536-541). Bi-specific antibodies that inhibit TIM3 and PD-1 are disclosed in US20130156774.

[0784] In one embodiment, the anti-TIM3 antibody or fragment thereof is an anti-TIM3 antibody molecule as described in US 2015/0218274, entitled “Antibody Molecules to TIM3 and Uses Thereof,” incorporated by reference in its entirety. In one embodiment, the anti-TIM3 antibody molecule includes at least one, two, three, four, five or six CDRs (or collectively all of the CDRs) from a heavy and light chain variable region from an antibody chosen from any of ABTIM3, ABTIM3-hum01, ABTIM3-hum02, ABTIM3-hum03, ABTIM3-hum04, ABTIM3-hum05, ABTIM3-hum06, ABTIM3-hum07, ABTIM3-hum08, ABTIM3-hum09, ABTIM3-hum10, ABTIM3-hum11, ABTIM3-hum12, ABTIM3-hum13, ABTIM3-hum14, ABTIM3-hum15, ABTIM3-hum16, ABTIM3-hum17, ABTIM3-hum18, ABTIM3-hum19, ABTIM3-hum20, ABTIM3-hum21, ABTIM3-hum22, ABTIM3-hum23; or as described in Tables 1-4 of US 2015/0218274; or encoded by the nucleotide sequence in Tables 1-4; or a sequence substantially identical (e.g., at least 80%, 85%, 90%, 92%, 95%, 97%, 98%, 99% or higher identical) to any of the aforesaid sequences, or closely related CDRs, e.g., CDRs which are identical or which have at least one amino acid alteration, but not more than two, three or four alterations (e.g., substitutions, deletions, or insertions, e.g., conservative substitutions).

[0785] In yet another embodiment, the anti-TIM3 antibody molecule comprises at least one, two, three or four variable regions from an antibody described herein, e.g., an antibody chosen from any of ABTIM3, ABTIM3-hum01, ABTIM3-hum02, ABTIM3-hum03, ABTIM3-hum04, ABTIM3-hum05, ABTIM3-hum06, ABTIM3-hum07, ABTIM3-hum08, ABTIM3-hum09, ABTIM3-hum10, ABTIM3-hum 11, ABTIM3-hum12, ABTIM3-hum13, ABTIM3-hum14, ABTIM3-hum15, ABTIM3-hum 16, ABTIM3-hum17, ABTIM3-hum 18, ABTIM3-hum19, ABTIM3-hum20, ABTIM3-hum21, ABTIM3-hum22, ABTIM3-hum23; or as described in Tables 1-4 of US 2015/0218274; or encoded by the nucleotide sequence in Tables 1-4; or a sequence substantially identical (e.g., at least 80%, 85%, 90%, 92%, 95%, 97%, 98%, 99% or higher identical) to any of the aforesaid sequences.

[0786] In other embodiments, the agent which enhances the activity of a CAR-expressing cell is a CEACAM inhibitor (e.g., CEACAM-1, CEACAM-3, and/or CEACAM-5 inhibitor). In one embodiment, the inhibitor of CEACAM is an anti-CEACAM antibody molecule. Exemplary anti-CEACAM-1 antibodies are described in WO 2010/125571, WO 2013/082366 WO 2014/059251 and WO 2014/022332, e.g., a monoclonal antibody 34B1, 26H7, and 5F4; or a recombinant form thereof, as described in, e.g., US 2004/0047858, U.S. Pat. No. 7,132,255 and WO 99/052552. In other embodiments, the anti-CEACAM antibody binds to CEACAM-5 as described in, e.g., Zheng et al. PLoS One. 2010 Sep. 2; 5(9). pii: e12529 (DOI:10:1371/journal.pone.0021146), or crossreacts with CEACAM-1 and CEACAM-5 as described in, e.g., WO 2013/054331 and US 2014/0271618.

[0787] Without wishing to be bound by theory, carcinoembryonic antigen cell adhesion molecules (CEACAM), such as CEACAM-1 and CEACAM-5, are believed to mediate, at least in part, inhibition of an anti-tumor immune response (see e.g., Markel et al. J Immunol. 2002 Mar. 15; 168(6):2803-10; Markel et al. J Immunol. 2006 Nov. 1; 177(9):6062-71; Markel et al. Immunology. 2009 February; 126(2):186-200; Markel et al. Cancer Immunol Immunother. 2010 February; 59(2):215-30; Ortenberg et al. Mol Cancer Ther. 2012 Jun.; 11(6):1300-10; Stern et al. J Immunol. 2005 Jun. 1; 174(11):6692-701; Zheng et al. PLoS One. 2010 Sep. 2; 5(9). pii: e12529). For example, CEACAM-1 has been described as a heterophilic ligand for TIM-3 and as playing a role in TIM-3-mediated T cell tolerance and exhaustion (see e.g., WO 2014/022332; Huang, et al. (2014) Nature doi:10.1038/nature13848). In embodiments, co-blockade of CEACAM-1 and TIM-3 has been shown to enhance an anti-tumor immune response in xenograft colorectal cancer models (see e.g., WO 2014/022332; Huang, et al. (2014), supra). In other embodiments, co-blockade of CEACAM-1 and PD-1 reduce T cell tolerance as described, e.g., in WO 2014/059251. Thus, CEACAM inhibitors can be used with the other immunomodulators described herein (e.g., anti-PD-1 and/or anti-TIM-3 inhibitors) to enhance an immune response against a cancer, e.g., a melanoma, a lung cancer (e.g., NSCLC), a bladder cancer, a colon cancer an ovarian cancer, and other cancers as described herein.

[0788] LAG3 (lymphocyte activation gene-3 or CD223) is a cell surface molecule expressed on activated T cells and B cells that has been shown to play a role in CD8+ T cell exhaustion. Antibodies, antibody fragments, and other inhibitors of LAG3 and its ligands are available in the art and may be used combination with a CD19 CAR described herein. For example, BMS-986016 (Bristol-Myers Squib) is a monoclonal antibody that targets LAG3. IMP701 (Immutep) is an antagonist LAG3 antibody and IMP731 (Immutep and GlaxoSmithKline) is a depleting LAG3 antibody. Other LAG3 inhibitors include IMP321 (Immutep), which is a recombinant fusion protein of a soluble portion of LAG3 and Ig that binds to MHC class II molecules and activates antigen presenting cells (APC). Other antibodies are disclosed, e.g., in WO2010/019570.

[0789] In one embodiment, the anti-LAG3 antibody or fragment thereof is an anti-LAG3 antibody molecule as described in US 2015/0259420, entitled “Antibody Molecules to LAG3 and Uses Thereof,” incorporated by reference in its entirety. In one embodiment, the anti-LAG3 antibody molecule includes at least one, two, three, four, five or six CDRs (or collectively all of the CDRs) from a heavy and light chain variable region from an antibody chosen from any of BAP050-hum01, BAP050-hum02, BAP050-hum03, BAP050-hum04, BAP050-hum05, BAP050-hum06, BAP050-hum07, BAP050-hum08, BAP050-hum09, BAP050-hum10, BAP050-hum11, BAP050-hum12, BAP050-hum113, BAP050-hum14, BAP050-hum 15, BAP050-hum 16, BAP050-hum 17, BAP050-hum 18, BAP050-hum 19, BAP050-hum20, huBAP050(Ser) (e.g., BAP050-hum01-Ser, BAP050-hum02-Ser, BAP050-hum03-Ser, BAP050-hum04-Ser, BAP050-hum05-Ser, BAP050-hum06-Ser, BAP050-hum07-Ser, BAP050-hum08-Ser, BAP050-hum09-Ser, BAP050-hum100-Ser, BAP050-hum11-Ser, BAP050-hum 12-Ser, BAP050-hum 13-Ser, BAP050-hum 14-Ser, BAP050-hum 15-Ser, BAP050-hum18-Ser, BAP050-hum19-Ser, or BAP050-hum20-Ser), BAP050-Clone-F, BAP050-Clone-G, BAP050-Clone-H, BAP050-Clone-I, or BAP050-Clone-J; or as described in Table 1 of US 2015/0259420; or encoded by the nucleotide sequence in Table 1; or a sequence substantially identical (e.g., at least 80%, 85%, 90%, 92%, 95%, 97%, 98%, 99% or higher identical) to any of the aforesaid sequences, or closely related CDRs, e.g., CDRs which are identical or which have at least one amino acid alteration, but not more than two, three or four alterations (e.g., substitutions, deletions, or insertions, e.g., conservative substitutions).

[0790] In yet another embodiment, the anti-LAG3 antibody molecule comprises at least one, two, three or four variable regions from an antibody described herein, e.g., an antibody chosen from any of BAP050-hum01, BAP050-hum02, BAP050-hum03, BAP050-hum04, BAP050-hum05, BAP050-hum06, BAP050-hum07, BAP050-hum08, BAP050-hum09, BAP050-hum 10, BAP050-hum 11, BAP050-hum 12, BAP050-hum 13, BAP050-hum 14, BAP050-hum 15, BAP050-hum16, BAP050-hum17, BAP050-hum18, BAP050-hum19, BAP050-hum20, huBAP050(Ser) (e.g., BAP050-hum01-Ser, BAP050-hum02-Ser, BAP050-hum03-Ser, BAP050-hum04-Ser, BAP050-hum05-Ser, BAP050-hum06-Ser, BAP050-hum07-Ser, BAP050-hum08-Ser, BAP050-hum09-Ser, BAP050-hum 10-Ser, BAP050-hum 11-Ser, BAP050-hum12-Ser, BAP050-hum13-Ser, BAP050-hum14-Ser, BAP050-hum15-Ser, BAP050-hum 18-Ser, BAP050-hum 19-Ser, or BAP050-hum20-Ser), BAP050-Clone-F, BAP050-Clone-G, BAP050-Clone-H, BAP050-Clone-I, or BAP050-Clone-J; or as described in Table 1 of US 2015/0259420; or encoded by the nucleotide sequence in Tables 1; or a sequence substantially identical (e.g., at least 80%, 85%, 90%, 92%, 95%, 97%, 98%, 99% or higher identical) to any of the aforesaid sequences. In some embodiments, the agent which enhances the activity of a CAR-expressing cell can be, e.g., a fusion protein comprising a first domain and a second domain, wherein the first domain is an inhibitory molecule, or fragment thereof, and the second domain is a polypeptide that is associated with a positive signal, e.g., a polypeptide comprising an antracellular signaling domain as described herein. In some embodiments, the polypeptide that is associated with a positive signal can include a costimulatory domain of CD28, CD27, ICOS, e.g., an intracellular signaling domain of CD28, CD27 and/or ICOS, and/or a primary signaling domain, e.g., of CD3 zeta, e.g., described herein. In one embodiment, the fusion protein is expressed by the same cell that expressed the CAR In another embodiment, the fusion protein is expressed by a cell, e.g., a T cell that does not express a CAR of the present disclosure.

[0791] In one embodiment, the agent which enhances activity of a CAR-expressing cell described herein is miR-17-92.

[0792] In one embodiment, the agent which enhances activity of a CAR-described herein is a cytokine. Cytokines have important functions related to T cell expansion, differentiation, survival, and homeostatis. Cytokines that can be administered to the subject receiving a CAR-expressing cell described herein include: IL-2, IL-4, IL-7, IL-9, IL-15, IL-18, and IL-21, or a combination thereof. In preferred embodiments, the cytokine administered is IL-7, IL-15, or IL-21, or a combination thereof. The cytokine can be administered once a day or more than once a day, e.g., twice a day, three times a day, or four times a day. The cytokine can be administered for more than one day, e.g. the cytokine is administered for 2 days, 3 days, 4 days, 5 days, 6 days, 1 week, 2 weeks, 3 weeks, or 4 weeks. For example, the cytokine is administered once a day for 7 days.

[0793] In embodiments, the cytokine is administered in combination with CAR-expressing T cells. The cytokine can be administered simultaneously or concurrently with the CAR-expressing T cells, e.g., administered on the same day. The cytokine may be prepared in the same pharmaceutical composition as the CAR-expressing T cells, or may be prepared in a separate pharmaceutical composition. Alternatively, the cytokine can be administered shortly after administration of the CAR-expressing T cells, e.g., 1 day, 2 days, 3 days, 4 days, 5 days, 6 days, or 7 days after administration of the CAR-expressing T cells. In embodiments where the cytokine is administered in a dosing regimen that occurs over more than one day, the first day of the cytokine dosing regimen can be on the same day as administration with the CAR-expressing T cells, or the first day of the cytokine dosing regimen can be 1 day, 2 days, 3 days, 4 days, 5 days, 6 days, or 7 days after administration of the CAR-expressing T cells. In one embodiment, on the first day, the CAR-expressing T cells are administered to the subject, and on the second day, a cytokine is administered once a day for the next 7 days. In a preferred embodiment, the cytokine to be administered in combination with CAR-expressing T cells is IL-7, IL-15, or IL-21.

[0794] In other embodiments, the cytokine is administered a period of time after administration of CAR-expressing cells, e.g., at least 2 weeks, 3 weeks, 4 weeks, 6 weeks, 8 weeks, 10 weeks, 12 weeks, 4 months, 5 months, 6 months, 7 months, 8 months, 9 months, 10 months, 11 months, or 1 year or more after administration of CAR-expressing cells. In one embodiment, the cytokine is administered after assessment of the subject's response to the CAR-expressing cells. For example, the subject is administered CAR-expressing cells according to the dosage and regimens described herein. The response of the subject to CART therapy is assessed at 2 weeks, 3 weeks, 4 weeks, 6 weeks, 8 weeks, 10 weeks, 12 weeks, 4 months, 5 months, 6 months, 7 months, 8 months, 9 months, 10 months, 11 months, or 1 year or more after administration of CAR-expressing cells, using any of the methods described herein, including inhibition of tumor growth, reduction of circulating tumor cells, or tumor regression. Subjects that do not exhibit a sufficient response to CART therapy can be administered a cytokine. Administration of the cytokine to the subject that has sub-optimal response to the CART therapy improves CART efficacy or anti-tumor activity. In a preferred embodiment, the cytokine administered after administration of CAR-expressing cells is IL-7.

Combination with a low dose of an mTOR inhibitor

[0795] In one embodiment, the CAR-expressing cells described herein, are administered in combination with a low, immune enhancing dose of an mTOR inhibito, e.g., as described in PCT publication WO/2016/014530.

[0796] In another embodiment, administration of a low, immune enhancing, dose of an mTOR inhibitor results in increased or prolonged proliferation of CAR-expressing cells, e.g., in culture or in a subject, e.g., as compared to non-treated CAR-expressing cells or a non-treated subject. In embodiments, increased proliferation is associated with in an increase in the number of CAR-expressing cells. Methods for measuring increased or prolonged proliferation are described in Examples 4 and 5. In another embodiment, administration of a low, immune enhancing, dose of an mTOR inhibitor results in increased killing of cancer cells by CAR-expressing cells, e.g., in culture or in a subject, e.g., as compared to non-treated CAR-expressing cells or a non-treated subject. In embodiments, increased killing of cancer cells is associated with in a decrease in tumor volume.

[0797] In one embodiment, the cells expressing a CAR molecule, e.g., a CAR molecule described herein, are administered in combination with a low, immune enhancing dose of an mTOR inhibitor, e.g., an allosteric mTOR inhibitor, e.g., RAD001, or a catalytic mTOR inhibitor. For example, administration of the low, immune enhancing, dose of the mTOR inhibitor can be initiated prior to administration of a CAR-expressing cell described herein; completed prior to administration of a CAR-expressing cell described herein; initiated at the same time as administration of a CAR-expressing cell described herein; overlapping with administration of a CAR-expressing cell described herein; or continuing after administration of a CAR-expressing cell described herein.

[0798] Alternatively or in addition, administration of a low, immune enhancing, dose of an mTOR inhibitor can optimize immune effector cells to be engineered to express a CAR molecule described herein. In such embodiments, administration of a low, immune enhancing, dose of an mTOR inhibitor, e.g., an allosteric inhibitor, e.g., RAD001, or a catalytic inhibitor, is initiated or completed prior to harvest of immune effector cells, e.g., T cells or NK cells, to be engineered to express a CAR molecule described herein, from a subject.

[0799] In another embodiment, immune effector cells, e.g., T cells or NK cells, to be engineered to express a CAR molecule described herein, e.g., after harvest from a subject, or CAR-expressing immune effector cells, e.g., T cells or NK cells, e.g., prior to administration to a subject, can be cultured in the presence of a low, immune enhancing, dose of an mTOR inhibitor.

[0800] As used herein, the term “mTOR inhibitor” refers to a compound or ligand, or a pharmaceutically acceptable salt thereof, which inhibits the mTOR kinase in a cell. In an embodiment an mTOR inhibitor is an allosteric inhibitor. In an embodiment an mTOR inhibitor is a catalytic inhibitor.

[0801] Allosteric mTOR inhibitors include the neutral tricyclic compound rapamycin (sirolimus), rapamycin-related compounds, that is compounds having structural and functional similarity to rapamycin including, e.g., rapamycin derivatives, rapamycin analogs (also referred to as rapalogs) and other macrolide compounds that inhibit mTOR activity.

[0802] Rapamycin is a known macrolide antibiotic produced by Streptomyces hygroscopicus having the structure shown in Formula A.

[chemical structure]

[0803] Other suitable rapamycin analogs include, but are not limited to, RAD001, otherwise known as everolimus (Afinitor®), has the chemical name (1R,9S,12S, 15R, 16E,18R,19R,21R,23S,24E,26E,28E,30S,32S,32S,35R)-1,18-dihydroxy-12-{(I R)-2-[(1 S,3R,4R)-4-(2-hydroxyethoxy)-3-methoxycyclohexyl]-1-methylethyl}-19,30-dimethoxy-15,17,21,23,29,35-hexamethyl-1,36-dioxa-4-aza-tricyclo[30.3.1.04,9]hexatriaconta-16,24,26,28-tetraene-2,3,10,14,20-pentaone,sirolimus (rapamycin, AY-22989), 40-[3-hydroxy-2-(hydroxymethyl)-2-methylpropanoate]-rapamycin (also called temsirolimus or CCI-779) and ridaforolimus (AP-23573/MK-8669).b Other examples of allosteric mTor inhibitors include zotarolimus (ABT578) and umirolimus as described in US2005/0101624 the contents of which are incorporated by reference. Other suitable mTOR inhibitors are described in paragraphs 946 to 964 of International Publication WO2015/142675, filed Mar. 13, 2015, which is incorporated by reference in its entirety. Low, immune enhancing doses of an mTOR inhibitor, suitable levels of mTOR inhibition associated with low doses of an mTOR inhibitor, methods for detecting the level of mTOR inhibition, and suitable pharmaceutical compositions thereof are further described in paragraphs 936 to 945 and 965 to 1003 of International Publication WO2015/142675, filed Mar. 13, 2015, which is incorporated by reference in its entirety.

### Pharmaceutical Compositions and Treatments

[0804] Pharmaceutical compositions of the present disclosure may comprise a CAR-expressing cell, e.g., a plurality of CAR-expressing cells, as described herein, in combination with one or more pharmaceutically or physiologically acceptable carriers, diluents or excipients. Such compositions may comprise buffers such as neutral buffered saline, phosphate buffered saline and the like; carbohydrates such as glucose, mannose, sucrose or dextrans, mannitol; proteins; polypeptides or amino acids such as glycine; antioxidants; chelating agents such as EDTA or glutathione; adjuvants (e.g., aluminum hydroxide); and preservatives. Compositions of the present disclosure are in one aspect formulated for intravenous administration.

[0805] Pharmaceutical compositions of the present disclosure may be administered in a manner appropriate to the disease to be treated (or prevented). The quantity and frequency of administration will be determined by such factors as the condition of the patient, and the type and severity of the patient's disease, although appropriate dosages may be determined by clinical trials.

[0806] In one embodiment, the pharmaceutical composition is substantially free of, e.g., there are no detectable levels of a contaminant, e.g., selected from the group consisting of endotoxin, mycoplasma, replication competent lentivirus (RCL), p24, VSV-G nucleic acid, HIV gag, residual anti-CD3/anti-CD28 coated beads, mouse antibodies, pooled human serum, bovine serum albumin, bovine serum, culture media components, vector packaging cell or plasmid components, a bacterium and a fungus. In one embodiment, the bacterium is at least one selected from the group consisting of Alcaligenes faecalis, Candida albicans, Escherichia coli, Haemophilus influenza, Neisseria meningitides, Pseudomonas aeruginosa, Staphylococcus aureus, Streptococcus pneumonia, and Streptococcus pyogenes group A.

[0807] When “an immunologically effective amount,” “an anti-tumor effective amount,” “a tumor-inhibiting effective amount,” or “therapeutic amount” is indicated, the precise amount of the compositions of the present disclosure to be administered can be determined by a physician with consideration of individual differences in age, weight, tumor size, extent of infection or metastasis, and condition of the patient (subject). It can generally be stated that a pharmaceutical composition comprising the immune effector cells (e.g., T cells, NK cells) described herein may be administered at a dosage of 10⁴ to 10′ cells/kg body weight, in some instances 10′ to 10⁶ cells/kg body weight, including all integer values within those ranges. T cell compositions may also be administered multiple times at these dosages. The cells can be administered by using infusion techniques that are commonly known in immunotherapy (see, e.g., Rosenberg et al., New Eng. J. of Med. 319:1676, 1988).

[0808] In some embodiments, a dose of CAR-expressing cells described herein (e.g., cells comprising, e.g., engineered to express, a TA CAR and a BCA CAR) comprises about 1×10⁶, 1.1×10⁶,2×10⁶,3.6×10⁶,5×10⁶,1×10⁷,1.8×10⁷,2×10⁷,5×10⁷,1×10⁸,2×10,3×108, or 5×10⁸ cells/kg. In some embodiments, a dose of CAR cells (e.g., cells comprising, e.g., engineered to express, a TA CAR and a BCA CAR) comprises at least about 1×10⁶, 1.1×10⁶, 2×10⁶, 3.6×10⁶, 5×10⁶, 1×10⁷, 1.8×10⁷, 2×10⁷, 5×10⁷, 1×10⁸, 2×10⁸, 3×10⁸, or 5×10⁸ cells/kg. In some embodiments, a dose of CAR cells (e.g., cells comprising, e.g., engineered to express, a TA CAR and a BCA CAR) comprises up to about 1×10⁶, 1.1×10⁶, 2×10⁶, 3.6×10⁶, 5×10⁶, 1×10⁷, 1.8×10⁷, 2×10⁷, 5×10⁷, 1×10, 2×10⁸, 3×10⁸, or 5×10⁸ cells/kg. In some embodiments, a dose of CAR cells (e.g., cells comprising, e.g., engineered to express, a TA CAR and a BCA CAR) comprises about 1.1×10⁶-1.8×10⁷ cells/kg. In some embodiments, a dose of CAR cells (e.g., cells comprising, e.g., engineered to express, a TA CAR and a BCA CAR) comprises about 1×10⁷, 2×10⁷, 5×10⁷, 1×10⁸, 2×10⁸, 3×10⁸, 5×10⁸, 1×10⁹, 2×10⁹, or 5×10⁹ cells. In some embodiments, a dose of CAR cells (e.g., cells comprising, e.g., engineered to express, a TA CAR and a BCA CAR) comprises at least about 1×10⁷, 2×10⁷, 5×10⁷, 1×10⁸, 2×10⁸, 3×10⁸, 5×10⁸, 1×10⁹, 2×10⁹, or 5×10⁹ cells. In some embodiments, a dose of CAR cells (e.g., cells comprising, e.g., engineered to express, a TA CAR and a BCA CAR) comprises up to about 1×10, 2×10′, 5×10⁷, 1×10⁸, 2×10⁸, 3×10⁸, 5×10⁸, 1×10⁹, 2×10⁹, or 5×10⁹ cells.

[0809] In some embodiments, a dose of CAR cells (e.g., cells comprising, e.g., engineered to express, a TA CAR and a BCA CAR) comprises up to about 1×10′, 1.5×10⁷, 2×10′, 2.5×10⁷,3×10⁷,3.5×10⁷,4×10⁷,5×10, 1×10⁸,1.5×10,2×10⁸,2.5×10⁸,3×10, 3.5×10⁸, 4×10⁸, 5×10⁸, 1×10⁹, 2×10⁹, or 5×10⁹ cells. In some embodiments, a dose of CAR cells (e.g., cells comprising, e.g., engineered to express, a TA CAR and a BCA CAR) comprises up to about 1-3×10⁷ to 1-3×10⁸ of cells. In some embodiments, the subject is administered about 1-3×10⁷ of the cells. In other embodiments, the subject is administered about 1-3×10⁸ of the cells.

[0810] The cells can be administered by using infusion techniques that are commonly known in immunotherapy (see, e.g., Rosenberg et al., New Eng. J. of Med. 319:1676, 1988).

[0811] In certain aspects, it may be desired to administer activated immune effector cells (e.g., T cells, NK cells) to a subject and then subsequently redraw blood (or have an apheresis performed), activate immune effector cells (e.g., T cells, NK cells) therefrom according to the present disclosure, and reinfuse the patient with these activated and expanded immune effector cells (e.g., T cells, NK cells). This process can be carried out multiple times every few weeks. In certain aspects, immune effector cells (e.g., T cells, NK cells) can be activated from blood draws of from 10 cc to 400 cc. In certain aspects, immune effector cells (e.g., T cells, NK cells) are activated from blood draws of 20 cc, 30 cc, 40 cc, 50 cc, 60 cc, 70 cc, 80 cc, 90 cc, or 100 cc.

[0812] The administration of the subject compositions may be carried out in any convenient manner, including by aerosol inhalation, injection, ingestion, transfusion, implantation or transplantation. The compositions described herein may be administered to a patient trans arterially, subcutaneously, intradermally, intratumorally, intranodally, intramedullary, intramuscularly, by intravenous (i.v.) injection, or intraperitoneally. In one aspect, the T cell compositions of the present disclosure are administered to a patient by intradermal or subcutaneous injection. In one aspect, the T cell compositions of the present disclosure are administered by i.v. injection. The compositions of immune effector cells (e.g., T cells, NK cells) may be injected directly into a tumor, lymph node, or site of infection.

[0813] In a particular exemplary aspect, subjects may undergo leukapheresis, wherein leukocytes are collected, enriched, or depleted ex vivo to select and/or isolate the cells of interest, e.g., T cells. These T cell isolates may be expanded by methods known in the art and treated such that one or more CAR constructs of the invention may be introduced, thereby creating a CAR T cell of the invention. Subjects in need thereof may subsequently undergo standard treatment with high dose chemotherapy followed by peripheral blood stem cell transplantation. In certain aspects, following or concurrent with the transplant, subjects receive an infusion of the expanded CAR T cells of the present disclosure. In an additional aspect, expanded cells are administered before or following surgery.

[0814] The dosage of the above treatments to be administered to a patient will vary with the precise nature of the condition being treated and the recipient of the treatment. The scaling of dosages for human administration can be performed according to art-accepted practices. The dose for CAMPATH, for example, will generally be in the range 1 to about 100 mg for an adult patient, usually administered daily for a period between 1 and 30 days. The preferred daily dose is 1 to 10 mg per day although in some instances larger doses of up to 40 mg per day may be used (described in U.S. Pat. No. 6,120,766).

[0815] In one embodiment, the CAR is introduced into immune effector cells (e.g., T cells, NK cells), e.g., using in vitro transcription, and the subject (e.g., human) receives an initial administration of CAR immune effector cells (e.g., T cells, NK cells) of the invention, and one or more subsequent administrations of the CAR immune effector cells (e.g., T cells, NK cells) of the invention, wherein the one or more subsequent administrations are administered less than 15 days, e.g., 14, 13, 12, 11, 10, 9, 8, 7, 6, 5, 4, 3, or 2 days after the previous administration. In one embodiment, more than one administration of the CAR immune effector cells (e.g., T cells, NK cells) of the invention are administered to the subject (e.g., human) per week, e.g., 2, 3, or 4 administrations of the CAR immune effector cells (e.g., T cells, NK cells) of the invention are administered per week. In one embodiment, the subject (e.g., human subject) receives more than one administration of the CAR immune effector cells (e.g., T cells, NK cells) per week (e.g., 2, 3 or 4 administrations per week) (also referred to herein as a cycle), followed by a week of no CAR immune effector cells (e.g., T cells, NK cells) administrations, and then one or more additional administration of the CAR immune effector cells (e.g., T cells, NK cells) (e.g., more than one administration of the CAR immune effector cells (e.g., T cells, NK cells) per week) is administered to the subject. In another embodiment, the subject (e.g., human subject) receives more than one cycle of CAR immune effector cells (e.g., T cells, NK cells), and the time between each cycle is less than 10, 9, 8, 7, 6, 5, 4, or 3 days. In one embodiment, the CAR immune effector cells (e.g., T cells, NK cells) are administered every other day for 3 administrations per week. In one embodiment, the CAR immune effector cells (e.g., T cells, NK cells) of the invention are administered for at least two, three, four, five, six, seven, eight or more weeks.

### Examples

[0816] The invention is further described in detail by reference to the following experimental examples. These examples are provided for purposes of illustration only, and are not intended to be limiting unless otherwise specified. Thus, the invention should in no way be construed as being limited to the following examples, but rather, should be construed to encompass any and all variations which become evident as a result of the teaching provided herein.

### Example 1

[0817] Human T lymphocytes are taken from a subject and are provided ex vivo, stimulated using anti-CD3/CD28, and transduced with a lentivirus vector encoding a second-generation CD19 CAR (a CAR comprising a CD19 binding domain, a transmembrane domain, and an intracellular signaling domain comprising a CD3z primary signaling domain and a 4-1BB costimulatory signaling domain) under the control of the EF1a promoter, and with a lentiviral vector encoding a second-generation EGFRvIII CAR (a CAR comprising a EGFRvIII binding domain, a transmembrane domain, and an intracellular signaling domain comprising a CD3z primary signaling domain and a 4-1BB costimulatory signaling domain) under the control of the EF1a promoter. Systems such as this, for engineering a cell to express both the CD19 CAR and the EGFRvIII CAR, are illustrated in FIG. 2. As well, a single bicistronic lentivirus vector is constructed which encodes a second generation CD19 CAR and a second generation EGFRvIII CAR with an intervening P2A site, all under the control of the EF1a promoter. Such a construct, for engineering a cell to express both the CD19 CAR and the EGFRvIII CAR, is illustrated in FIG. 1. Cells expressing both the second-generation CD19 CAR and the second-generation EGFRvIII CAR are provided by transducing T cells either with a mixture of the two lentiviral vectors (each encoding either the CD19 CAR or the EGFRvIII CAR; FIG. 2) or with the single lentiviral vector encoding the bicistronic construct (FIG. 1), and CAR T cell proliferation, cytokine release and cytotoxicity are assayed against CD19+/EGFRvIII-cells, CD19−/EGFRvIII+ cells, CD19+/EGFRVII+ cells and a population of cells comprising CD19+/EGFRvII− cells and CD19−/EGFRvIII+ cells, using methods disclosed herein (e.g., as described in WO2014/130657), and the activities are compared to cells expressing only the second-generation EGFRvIII CAR. Cells are further assayed in vivo (proliferation, long term persistence and tumor toxicity, e.g., by methods described in WO2014/130657) by administering the cells intravenously in xenogeneic immune-compromised NOD/SCID/common-gamma chain−/− mice with established EGFRvIII U87vIII glioma tumors. Autologous B cells or immortalized B cells expressing CD19 are co-infused with the CAR T cells to enhance CAR T cell activation. For clinical application, autologous T cells are transduced to express an EGFRvIII CAR and a CD19 CAR and are administered to a patient suffering from glioblastoma multiforme (GBM). CART cell persistence, proliferation/expansion and anti-tumor efficacy are monitored. In patients, their normal B cells expressing CD19 provide a source of stimulation for the second CAR

### Example 2

[0818] Human T lymphocytes are taken from a subject and are provided ex vivo, stimulated using anti-CD3/CD28, and transduced with a lentivirus vector encoding a second-generation BCMA CAR (a CAR comprising a BCMA binding domain, a transmembrane domain, and an intracellular signaling domain comprising a CD3z primary signaling domain and a 4-1BB costimulatory signaling domain) under the control of the EF1a promoter, and with a lentiviral vector encoding a second-generation EGFRvIII CAR (a CAR comprising a EGFRvIII binding domain, a transmembrane domain, and an intracellular signaling domain comprising a CD3z primary signaling domain and a 4-1BB costimulatory signaling domain) under the control of the EF1a promoter. Cells expressing both the second-generation BCMA CAR and the second-generation EGFRvII CAR are provided, and CAR T cell proliferation, cytokine release and cytotoxicity are assayed against BCMA+/EGFRvII− cells, BCMA−/EGFRvII+ cells, BCMA+/EGFRVIII+ cells and a population of cells comprising BCMA+/EGFRvIII− cells and BCMA−/EGFRvIII+ cells, using methods disclosed herein (e.g., as described in WO2014/130657), and the activities are compared to cells expressing only the second-generation EGFRvIII CAR. Cells are further assayed in vivo (proliferation, long term persistence and tumor toxicity, e.g., by methods described in WO2014/130657) by administering the cells intravenously in xenogeneic immune-compromised NOD/SCID/common-gamma chain−/− mice with established EGFRvIII U87vIII glioma tumors. Autologous B cells or immortalized B cells expressing BCMA are co-infused with the CAR T cells to enhance CAR T cell activation. For clinical application, autologous T cells are transduced to express an EGFRvIII CAR and a BCMA CAR and are administered to a patient suffering from glioblastoma multiforme (GBM). CART cell persistence, proliferation/expansion and anti-tumor efficacy are monitored. In patients, their normal B cells expressing BCMA provide a source of stimulation for the second CAR.

### Example 3

[0819] Human T lymphocytes are taken from a subject and are provided ex vivo, stimulated using anti-CD3/CD28, and transduced with a lentivirus vector encoding a second-generation CD19 CAR (a CAR comprising a CD19 binding domain, a transmembrane domain, and an intracellular signaling domain comprising a CD3z primary signaling domain and a 4-1BB costimulatory signaling domain) under the control of the EF1a promoter, and with a lentiviral vector encoding a second-generation Mesothelin (“Meso”) CAR (a CAR comprising a Meso binding domain, a transmembrane domain, and an intracellular signaling domain comprising a CD3z primary signaling domain and a 4-1BB costimulatory signaling domain) under the control of the EF1a promoter. As well, a single bicistronic vector is constructed which encodes a second generation CD19 CAR and a second generation Mesothelin CAR with an intervening P2A site, all under the control of the EF1a promoter. Cells expressing both the second-generation CD19 CAR and the second-generation Mesothelin CAR are provided by transducing T cells either with a mixture of the two lentiviral vectors (each encoding either the CD19 CAR or the EGFRvIII CAR) or with the single lentiviral vector encoding the bicistronic construct, and CAR T cell proliferation, cytokine release and cytotoxicity are assayed against CD19+/Meso− cells, CD19−/Meso+ cells, CD19+/Meso+ cells and a population of cells comprising CD19+/Meso− cells and CD19−/Meso+ cells, using methods disclosed herein (e.g., as described in WO2015/090230), and the activities are compared to cells expressing only the second-generation Meso CAR. Cells are further assayed in vivo (proliferation, long term persistence and tumor toxicity, e.g., by methods described in WO2015/090230) by administering the cells intravenously in xenogeneic immune-compromised NOD/SCID/common-gamma chain−/− mice with established Meso-expressing ovarian adenocarcinoma (OVCAR8) xenografts. Autologous B cells or immortalized B cells expressing CD19 are co-infused with the CAR T cells to enhance CAR T cell activation. For clinical application, autologous T cells are transduced to express a Meso CAR and a CD19 CAR and are administered to patients suffering from a mesothelin-expressing cancer such as mesothelioma, pancreatic cancer, or ovarian cancer. CART cell persistence, proliferation/expansion and anti-tumor efficacy are monitored. In patients, their normal B cells expressing CD19 provide a source of stimulation for the second CAR.

### Example 4

[0820] Human T lymphocytes are taken from a subject and are provided ex vivo, stimulated using anti-CD3/CD28, and transduced with a lentivirus vector encoding a second-generation BCMA CAR (a CAR comprising a BCMA binding domain, a transmembrane domain, and an intracellular signaling domain comprising a CD3z primary signaling domain and a 4-1BB costimulatory signaling domain) under the control of the EF1a promoter, and with a lentiviral vector encoding a second-generation Mesothelin (“Meso”) CAR (a CAR comprising a Meso binding domain, a transmembrane domain, and an intracellular signaling domain comprising a CD3z primary signaling domain and a 4-1BB costimulatory signaling domain) under the control of the EF1a promoter. Cells expressing both the second-generation BCMA CAR and the second-generation Meso CAR are provided, and CAR T cell proliferation, cytokine release and cytotoxicity are assayed against BCMA+/Meso− cells, BCMA−/Meso+ cells, BCMA+/Meso+ cells and a population of cells comprising BCMA+/Meso− cells and BCMA−/Meso+ cells, using methods disclosed herein (e.g., as described in WO2015/090230), and the activities are compared to cells expressing only the second-generation Meso CAR. Cells are further assayed in vivo (proliferation, long term persistence and tumor toxicity, e.g., by methods described in WO2015/090230) by administering the cells intravenously in xenogeneic immune-compromised NOD/SCID/common-gamma chain−/− mice with established Meso-expressing ovarian adenocarcinoma (OVCAR8) xenografts. Autologous B cells or immortalized B cells expressing BCMA are co-infused with the CAR T cells to enhance CAR T cell activation. For clinical application, autologous T cells are transduced to express a Meso CAR and a BCMA CAR and are administered to patients suffering from a mesothelin-expressing cancer such as mesothelioma, pancreatic cancer, or ovarian cancer. CART cell persistence, proliferation/expansion and anti-tumor efficacy are monitored. In patients, their normal B cells expressing BCMA provide a source of stimulation for the second CAR.

### EQUIVALENTS

[0821] The disclosures of each and every patent, patent application, and publication cited herein are hereby incorporated herein by reference in their entirety. While this invention has been disclosed with reference to specific aspects, it is apparent that other aspects and variations of this invention may be devised by others skilled in the art without departing from the true spirit and scope of the invention. The appended claims are intended to be construed to include all such aspects and equivalent variations.

What is claimed is:

1. A cell comprising a first chimeric antigen receptor (CAR) and a second CAR, each of which comprises an antigen binding domain, a transmembrane domain, and an intracellular signaling domain, wherein the antigen binding domain of said first CAR binds to a B-Cell antigen and the antigen binding domain of said second CAR binds to a tumor antigen other than a B-Cell antigen, optionally wherein the B-Cell antigen and the tumor antigen other than a B-Cell antigen are not expressed on the same cell.

2. The cell of claim 1, wherein the second CAR binds:
(a) a solid tumor antigen;
(b) a myeloid tumor antigen; or
(c) an antigen of a hematological tumor not of B-cell lineage.

3. The cell of any one of claim 1 or 2, wherein said B-Cell antigen is selected from the group consisting of CD5, CD10, CD19, CD20, CD21, CD22, CD23, CD24, CD25, CD27, CD30, CD34, CD37, CD38, CD40, CD53, CD69, CD72, CD73, CD74, CD75, CD77, CD79a, CD79b, CD80, CD81, CD82, CD83, CD84, CD85, CD86, CD123, CD135, CD138, CD179, CD269, Flt3, ROR1, BCMA, FcRn5, FcRn2, CS-1, CXCR4, 5, 7, IL-7/3R, IL7/4/3R, and IL4R.

4. The cell of claim 3, wherein said B-Cell antigen is selected from the group consisting of CD19, CD20, CD22, FcRn5, FcRn2, BCMA, CS-1, and CD138

5. The cell of claim 3, wherein said B-Cell antigen is BCMA.

6. The cell of claim 5, wherein said antigen binding domain of said first CAR comprises a heavy chain complementary determining region 1 (HC CDR1), a heavy chain complementary determining region 2 (HC CDR2), and a heavy chain complementary determining region 3 (HC CDR3) of any heavy chain binding domain amino acid sequence listed in Table 12 or 13.

7. The cell of claim 6, wherein said antigen binding domain of said first CAR further comprises a light chain complementary determining region 1 (LC CDR1), a light chain complementary determining region 2 (LC CDR2), and a light chain complementary determining region 3 (LC CDR3) of any light chain binding domain amino acid sequence listed in Table 12 or 13.

8. The cell of any one of claims 5-7, wherein said antigen binding domain of said first CAR comprises:
(i) the amino acid sequence of any light chain variable region listed in Table 12 or 13:
(ii) an amino acid sequence having at least one, two or three modifications but not more than 20 or 10 modifications of the amino acid sequence of any of the light chain variable regions provided in Table 12 or 13; or
(iii) an amino acid sequence with 95-99% identity to the amino acid sequence of any of the light chain variable regions provided in Table 12 or 13.

9. The cell of any one of claims 5-8, wherein said antigen binding domain of said first CAR comprises:
(i) the amino acid sequence of any heavy chain variable region listed in Table 12 or 13;
(ii) an amino acid sequence having at least one, two or three modifications but not more than 20 or 10 modifications of the amino acid sequence of any of the heavy chain variable regions provided in Table 12 or 13; or
(iii) an amino acid sequence with 95-99% identity to the amino acid sequence of any of the heavy chain variable regions provided in Table 12 or 13.

10. The cell of any one of claims 5-9, wherein said antigen binding domain of said first CAR comprises a polypeptide having the amino acid sequence of any light chain variable region listed in Table 12 or 13, and the amino acid sequence of any heavy chain variable region listed in Table 12 or 13.

11. The cell of claim 10, wherein said antigen binding domain of said first CAR comprises a polypeptide having a sequence of SEQ ID NO: 349; SEQ ID NO: 339, SEQ ID NO: 340; SEQ ID NO: 341; SEQ ID NO: 342; SEQ ID NO: 343; SEQ ID NO: 344, SEQ ID NO: 345, SEQ ID NO: 346, SEQ ID NO: 347, SEQ ID NO: 348, SEQ ID NO: 350, SEQ ID NO: 351, SEQ ID NO: 352, SEQ ID NO: 353, SEQ ID NO: 429, SEQ ID NO: 430, SEQ ID NO: 431, SEQ ID NO: 432, SEQ ID NO: 433, SEQ ID NO: 434, SEQ ID NO: 435, SEQ ID NO: 436, SEQ ID NO: 437, SEQ ID NO: 438, SEQ ID NO: 439, SEQ ID NO: 440, SEQ ID NO: 441, SEQ ID NO: 442, SEQ ID NO: 443, SEQ ID NO: 444, SEQ ID NO: 445, SEQ ID NO: 446, SEQ ID NO: 447, SEQ ID NO: 448, SEQ ID NO: 449, SEQ ID NO: 563, SEQ ID NO: 564, SEQ ID NO: 565 or SEQ ID NO: 566.

12. The cell of claim 3, wherein said B-Cell antigen is CD19.

13. The cell of claim 12, wherein said antigen binding domain of said first CAR comprises a heavy chain complementary determining region 1 (HC CDR1), a heavy chain complementary determining region 2 (HC CDR2), and a heavy chain complementary determining region 3 (HC CDR3) of any heavy chain binding domain amino acid sequence listed in Table 6, Table 7 or Table 9.

14. The cell of claim 13, wherein said antigen binding domain of said first CAR further comprises a light chain complementary determining region 1 (LC CDR1), a light chain complementary determining region 2 (LC CDR2), and a light chain complementary determining region 3 (LC CDR3) of any light chain binding domain amino acid sequence listed in Table 6, Table 8 or Table 9.

15. The cell of any one of claims 12-14, wherein said antigen binding domain of said first CAR comprises:
(i) the amino acid sequence of any light chain variable region listed in Table 6 or Table 9;
(ii) an amino acid sequence having at least one, two or three modifications but not more than 20 or 10 modifications of the amino acid sequence of any of the light chain variable regions provided in Table 6 or Table 9; or
(iii) an amino acid sequence with 95-99% identity to the amino acid sequence of any of the light chain variable regions provided in Table 6 or Table 9.

16. The cell of any one of claims 12-15, wherein said antigen binding domain of said first CAR comprises:
(i) the amino acid sequence of any heavy chain variable region listed in Table 6 or Table 9;
(ii) an amino acid sequence having at least one, two or three modifications but not more than 20 or 10 modifications of the amino acid sequence of any of the heavy chain variable regions provided in Table 6 or Table 9; or
(iii) an amino acid sequence with 95-99% identity to the amino acid sequence of any of the heavy chain variable regions provided in Table 6 or Table 9.

17. The cell of any one of claims 12-16, wherein said antigen binding domain of said first CAR comprises a polypeptide having the amino acid sequence of any light chain variable region listed in Table 6 or Table 9, and the amino acid sequence of any heavy chain variable region listed in Table 6 or Table 9.

18. The cell of claim 17, wherein said antigen binding domain of said first CAR comprises a polypeptide having a sequence of SEQ ID NO: 83; SEQ ID NO: 84, SEQ ID NO: 85; SEQ ID NO: 86; SEQ ID NO: 87: SEQ ID NO: 88; SEQ ID NO: 89, SEQ ID NO: 90, SEQ ID NO: 91, SEQ ID NO: 92, SEQ ID NO: 93, SEQ ID NO: 94, SEQ ID NO: 95, or SEQ ID NO: 112.

19. The cell of any one of claims 1-18, wherein said second CAR binds a myeloid tumor antigen, and wherein said myeloid tumor antigen is selected from the group consisting of CD123, CD33 and CLL-1.

20. The cell of any one of claims 1-18, wherein said second CAR binds a T cell lymphoma antigen.

21. The cell of any one of claims 1-18, wherein said second CAR binds a solid tumor antigen, and wherein said solid tumor antigen is selected from the group consisting of EGFRvIII, mesothelin, GD2, Tn antigen, sTn antigen, Tn-O-Glycopeptides, sTn-O-Glycopeptides, PSMA, CD97, TAG72, CD44v6, CEA, EPCAM, KIT, IL-13Ra2, leguman, GD3, CD171, IL-11Ra, PSCA, MAD-CT-1, MAD-CT-2, VEGFR2, LewisY, CD24, PDGFR-beta, SSEA-4, folate receptor alpha, ERBBs (e.g., ERBB2), Her2/neu, MUC1, EGFR, NCAM, Ephrin B2, CAIX, LMP2, sLe, HMWMAA, o-acetyl-GD2, folate receptor beta, TEM1/CD248, TEM7R, FAP, Legumain, HPV E6 or E7, ML-IAP, CLDN6, TSHR, GPRC5D, ALK, Polysialic acid, Fos-related antigen, neutrophil elastase, TRP-2, CYP1B1, sperm protein 17, beta human chorionic gonadotropin, AFP, thyroglobulin, PLAC1, globoH, RAGE1, MN-CA IX, human telomerase reverse transcriptase, intestinal carboxyl esterase, mut hsp 70-2, NA-17, NY-BR-1, UPK2, HAVCR1, ADRB3, PANX3, NY-ESO-1, GPR20, Ly6k, OR51E2, TARP, GFRα4, and a peptide of any of these antigens presented on MHC.

22. The cell of claim 21, wherein said solid tumor antigen is selected from the group consisting of CLDN6, mesothelin and EGFRvIII.

23. The cell of claim 21, wherein said solid tumor antigen is EGFRvIII.

24. The cell of claim 23, wherein said antigen binding domain of said second CAR comprises a heavy chain complementary determining region 1 (HC CDR1), a heavy chain complementary determining region 2 (HC CDR2), and a heavy chain complementary determining region 3 (HC CDR3) of any anti-EGFRvIII heavy chain binding domain amino acid sequence listed in Table 5.

25. The cell of claim 24, wherein said antigen binding domain of said second CAR further comprises a light chain complementary determining region 1 (LC CDR1), a light chain complementary determining region 2 (LC CDR2), and a light chain complementary determining region 3 (LC CDR3) of any anti-EGFRvIII light chain binding domain amino acid sequence listed in Table 5.

26. The cell of any one of claims 23-25, wherein said antigen binding domain of said second CAR comprises:
(i) the amino acid sequence of any anti-EGFRvIII light chain variable region listed in Table 5;
(ii) an amino acid sequence having at least one, two or three modifications but not more than 20 or 10 modifications of the amino acid sequence of any of the anti-EGFRvIII light chain variable regions provided in Table 5; or
(iii) an amino acid sequence with 95-99% identity to the amino acid sequence of any of the anti-EGFRvIII light chain variable regions provided in Table 5.

27. The cell of any one of claims 23-26, wherein said antigen binding domain of said second CAR comprises:
(i) the amino acid sequence of any anti-EGFRvIII heavy chain variable region listed in Table 5;
(ii) an amino acid sequence having at least one, two or three modifications but not more than 20 or 10 modifications of the amino acid sequence of any of the anti-EGFRvIII heavy chain variable regions provided in Table 5; or
(iii) an amino acid sequence with 95-99% identity to the amino acid sequence of any of the anti-EGFRvIII heavy chain variable regions provided in Table 5.

28. The cell of any one of claims 23-27, wherein said antigen binding domain of said second CAR comprises a polypeptide having the amino acid sequence of any anti-EGFRvII light chain variable region listed in Table 5, and the amino acid sequence of any anti-EGFRvII heavy chain variable region listed in Table 5.

29. The cell of claim 28, wherein said antigen binding domain of said second CAR comprises a polypeptide having a sequence of any of SEQ ID NOS: 71-79.

30. The cell of claim 21, wherein said solid tumor antigen is mesothelin.

31. The cell of claim 30, wherein said antigen binding domain of said second CAR comprises a heavy chain complementary determining region 1 (HC CDR1), a heavy chain complementary determining region 2 (HC CDR2), and a heavy chain complementary determining region 3 (HC CDR3) of any heavy chain binding domain amino acid sequence listed in Table 2 or 3.

32. The cell of claim 31, wherein said antigen binding domain of said second CAR further comprises a light chain complementary determining region 1 (LC CDR1), a light chain complementary determining region 2 (LC CDR2), and a light chain complementary determining region 3 (LC CDR3) of any light chain binding domain amino acid sequence listed in Table 2 or 4.

33. The cell of any one of claims 30-32, wherein said antigen binding domain of said second CAR comprises:
(i) the amino acid sequence of any light chain variable region listed in Table 2;
(ii) an amino acid sequence having at least one, two or three modifications but not more than 20 or 10 modifications of the amino acid sequence of any of the light chain variable regions provided in Table 2; or
(iii) an amino acid sequence with 95-99% identity to the amino acid sequence of any of the light chain variable regions provided in Table 2.

34. The cell of any one of claims 30-33, wherein said antigen binding domain of said second CAR comprises:
(i) the amino acid sequence of any heavy chain variable region listed in Table 2;
(ii) an amino acid sequence having at least one, two or three modifications but not more than 20 or 10 modifications of the amino acid sequence of any of the heavy chain variable regions provided in Table 2; or
(iii) an amino acid sequence with 95-99% identity to the amino acid sequence of any of the heavy chain variable regions provided in Table 2.

35. The cell of any one of claims 30-34, wherein said antigen binding domain of said second CAR comprises a polypeptide having the amino acid sequence of any light chain variable region listed in Table 2, and the amino acid sequence of any heavy chain variable region listed in Table 2.

36. The cell of claim 35, wherein said antigen binding domain of said second CAR comprises a polypeptide having a sequence of any one of SEQ ID NOS: 46-70.

37. The cell of any one of claims 1-36, wherein said antigen binding domain of said first CAR is in the format of an scFv.

38. The cell of any one of claims 1-37, wherein said antigen binding domain of said second CAR is in the format of an scFv.

39. The cell of any one of claims 1-38, wherein said intracellular signaling domain of said first or said second CAR comprises one or more primary signaling domains.

40. The cell of claim 39, wherein said intracellular signaling domains of said first CAR and said second CAR comprise a primary signaling domain.

41. The cell of any one of claims 1-40, wherein said intracellular signaling domain of said first or said second CAR comprises one or more costimulatory signaling domains.

42. The cell of claim 41, wherein said intracellular signaling domains of said first CAR and said second CAR comprise one or more costimulatory signaling domains.

43. The cell of any one of claims 39-42, wherein the primary signaling domains comprise a CD3-zeta stimulatory domain.

44. The cell of any one of claims 41-43, wherein said costimulatory signaling domain is an intracellular domain of a costimulatory protein selected from the group consisting of CD27, CD28, 4-1BB (CD137), OX40, GITR, CD30, CD40, ICOS, BAFFR, HVEM, ICAM-1, lymphocyte function-associated antigen-1 (LFA-1), CD2, CDS, CD7, CD287, LIGHT, NKG2C, NKG2D, SLAMF7, NKp80, NKp30, NKp44, NKp46, CD160, B7-H3, and a ligand that specifically binds with CD83.

45. The cell of claim 44, wherein the costimulatory domain of both said first and said second CAR comprise an intracellular domain of 4-1BB.

46. The cell of any one of claims 41-45, wherein said one or more of said costimulatory domains comprises an intracellular domain of CD28.

47. The cell of any one of claims 41-45, wherein said first or second CAR comprises two costimulatory domains:
(1) a 4-1BB costimulatory domain and a CD28 costimulatory domain;
(2) a 4-1BB costimulatory domain and an ICOS costimulatory domain; or
(3) a CD28 costimulatory domain and an ICOS costimulatory domain.

48. The cell of any one of claims 1-11 and 19-47, wherein the antigen binding domain of said first CAR binds BCMA and the first CAR comprises a polypeptide having an amino acid sequence selected from the group consisting of SEQ ID NO: 949, SEQ ID NO: 950, SEQ ID NO: 951, SEQ ID NO: 952, SEQ ID NO: 953, SEQ ID NO: 954, SEQ ID NO: 955, SEQ ID NO: 956, SEQ ID NO: 957, SEQ ID NO: 958, SEQ ID NO: 959, SEQ ID NO: 960, SEQ ID NO: 961, SEQ ID NO: 962, SEQ ID NO: 963, SEQ ID NO: 979, SEQ ID NO: 980, SEQ ID NO: 981, SEQ ID NO: 982, SEQ ID NO: 983, SEQ ID NO: 984, SEQ ID NO: 985, SEQ ID NO: 986, SEQ ID NO: 987, SEQ ID NO: 988, SEQ ID NO: 989, SEQ ID NO: 990, SEQ ID NO: 991, SEQ ID NO: 992, SEQ ID NO: 993, SEQ ID NO: 994, SEQ ID NO: 995, SEQ ID NO: 996, SEQ ID NO: 997, SEQ ID NO: 998, and SEQ ID NO: 999.

49. The cell of any one of claims 1-4 and 12-47, wherein the antigen binding domain of said first CAR binds CD19 and the first CAR comprises a polypeptide having an amino acid sequence selected from the group consisting of SEQ ID NO: 269, SEQ ID NO: 270, SEQ ID NO: 271, SEQ ID NO: 272, SEQ ID NO: 273, SEQ ID NO: 274, SEQ ID NO: 275, SEQ ID NO: 276, SEQ ID NO: 277, SEQ ID NO: 278, SEQ ID NO: 279, SEQ ID NO: 280, and SEQ ID NO: 281.

50. The cell of any one of claims 1-18, 21-29 and 37-49, wherein the antigen binding domain of said second CAR binds EGFRvIII and the second CAR comprises a polypeptide having an amino acid sequence selected from the group consisting of SEQ ID NO: 1043, SEQ ID NO: 1049, SEQ ID NO: 1055, SEQ ID NO: 1061, SEQ ID NO: 1067, SEQ ID NO: 1073, SEQ ID NO: 1079, SEQ ID NO: 1085, SEQ ID NO: 1090, and SEQ ID NO: 1096.

51. The cell of any one of claims 1-18, 21, 22, and 30-49, wherein the antigen binding domain of said second CAR binds mesothelin and the second CAR comprises a polypeptide having an amino acid sequence selected from the group consisting of SEQ ID NO: 282, SEQ ID NO: 283, SEQ ID NO: 284, SEQ ID NO: 285, SEQ ID NO: 286, SEQ ID NO: 287, SEQ ID NO: 288, SEQ ID NO: 289, SEQ ID NO: 290, SEQ ID NO: 291, SEQ ID NO: 292, SEQ ID NO: 293, SEQ ID NO: 294, SEQ ID NO: 295, SEQ ID NO: 296, SEQ ID NO: 297, SEQ ID NO: 298, SEQ ID NO: 299, SEQ ID NO: 300, SEQ ID NO: 301, SEQ ID NO: 302, SEQ ID NO: 303, SEQ ID NO: 304, SEQ ID NO: 305, and SEQ ID NO: 306.

52. The cell of any one of claims 1-20 and 37-49, wherein said cell is derived from a patient diagnosed with a myeloid tumor, or a hematological tumor not of B-Cell lineage.

53. The cell of claim 52, wherein said patient is diagnosed with a myeloid tumor expressing an antigen selected from the group consisting of CD123, CD33 and CLL-1.

54. The cell of any one of claims 118, 21-51, wherein said cell is derived from a patient diagnosed with a solid tumor.

55. The cell of claim 54, wherein said patient is diagnosed with a solid tumor expressing an antigen selected from the group consisting of: EGFRvIII, mesothelin, GD2, Tn Ag, PSMA, TAG72, CD44v6, CEA, EPCAM, KIT, IL-13Ra2, GD3, CD171, IL-11Ra, PSCA, VEGFR2, LewisY, CD24, PDGFR-beta, SSEA-4, folate receptor alpha, ERBB2, Her2/neu, MUC1, EGFR, NCAM, Ephrin B2, CAIX, LMP2, sLe, HMWMAA, o-acetyl-GD2, folate receptor beta, TEM1/CD248, TEM7R, FAP, Legumain, HPV E6 or E7, CLDN6, TSHR, GPRC5D, ALK, Plysialic acid, PLAC1, globoH, NY-BR-1, UPK2, HAVCR1, ADRB3, PANX3, GPR20, Ly6k, OR51E2, TARP, and GFRα4.

56. The cell of any one of claims 1-51, wherein said cell is a human cell and is not derived from a patient diagnosed with a tumor.

57. The cell of any one of claims 1-56, wherein said cell is a T cell, a natural killer (NK) cell, a cytotoxic T lymphocyte (CTL), a tumor infiltrating lymphocyte (TIL), or a regulatory T cell.

58. A method for stimulating a T cell-mediated immune response to a solid tumor cell in a mammal, the method comprising administering to a mammal an effective amount of a cell of any one of claims 1-18, 21-51 and 54-57.

59. A method of providing an anti-solid tumor immunity in a mammal, comprising administering to the mammal an effective amount of a cell of any one of claims 1-18, 21-51 and 54-57.

60. A method of treating a mammal having a disease associated with expression of a solid tumor antigen, said method comprising administering an effective amount of a cell of any one of claims 1-18, 21-51 and 54-57.

61. A method for stimulating a T cell-mediated immune response to a myeloid tumor cell in a mammal, the method comprising administering to a mammal an effective amount of a cell of any one of claims 1-19, 37-49, 52, 53 and 56-57.

62. A method of providing an anti-myeloid tumor immunity in a mammal, comprising administering to the mammal an effective amount of a cell of any one of claims 1-19, 37-49, 52, 53 and 56-57.

63. A method of treating a mammal having a disease associated with expression of a myeloid tumor antigen, said method comprising administering an effective amount of a cell of any one of claims 1-19, 37-49, 52, 53 and 56-57.

64. The method of any one of claims 58-60, wherein said solid tumor expresses an antigen selected from the group consisting of: EGFRvIII, mesothelin, CS-1, GD2, Tn Ag, PSMA, TAG72, CD44v6, CEA, EPCAM, KIT, IL-13Ra2, GD3, CD171, IL-11Ra, PSCA, VEGFR2, LewisY, CD24, PDGFR-beta, SSEA-4, folate receptor alpha, ERBB2, Her2/neu, MUC1, EGFR, NCAM, Ephrin B2, CAIX, LMP2, sLe, HMWMAA, o-acetyl-GD2, folate receptor beta, TEM1/CD248, TEM7R, FAP, Legumain, HPV E6 or E7, CLDN6, TSHR, GPRC5D, ALK, Plysialic acid, PLAC1, globoH, NY-BR-1, UPK2, HAVCR1, ADRB3, PANX3, GPR20, Ly6k, OR51E2, TARP, and GFRα4.

65. The method of any one of claims 58-60 and 64, wherein said mammal has a tumor characterized as glioblastoma, ovarian cancer, lung cancer, prostate cancer, colorectal cancer, pancreatic cancer, breast carcinoma, adenocarcinoma or mesothelioma.

66. The method of any one of claims 61-63, wherein said myeloid tumor expresses an antigen selected from the group consisting of CD123, CD33 and CLL-1.

67. The method of any one of claims 61-63 and 66, wherein said mammal has a tumor characterized as acute myeloid leukemia (AML), acute lymphoblastic B-cell leukemia (B-cell acute lymphoid leukemia, BALL), acute lymphoblastic T-cell leukemia (T cell acute lymphoid leukemia (TALL)), B-cell prolymphocytic leukemia, chronic lymphocytic leukemia, chronic myeloid leukemia (CML), myelodysplastic syndrome, plasma cell myeloma, or a combination thereof.

68. The method of any one of claims 58-67, wherein said cells are autologous to the treated mammal.

69. The method of any one of claims 58-67, wherein said cells are allogeneic to the treated mammal.

70. The method of any one of claims 58-69, wherein said mammal is a human.

71. The method of any one of claims 58-70, wherein said administering of said cells results in partial or complete elimination of said tumor cells and, thereafter, continue to persist in said subject at a level greater than, or for a length of time longer than, otherwise identical cells that lack said first CAR.

72. The method of any of claims 58-71, wherein said mammal is administered a lymphodepleting therapy prior to, concurrently with, or after administration of said cells.

73. The method of any of claims 58-71, wherein said mammal is not administered a lymphodepleting therapy prior to or concurrently with administration of said cells.

74. A nucleic acid encoding the first CAR and the second CAR of any one of claims 1-51.

75. The nucleic acid of claim 74, wherein the sequence of said first CAR and said second CAR are separated by an independent ribosomal entry site, a promoter element, or a sequence encoding a T2A, P2A, E2A, or F2A element.

76. A vector comprising the nucleic acid of claim 74 or 75.

77. The vector of claim 76, wherein said vector is a lentiviral vector.

78. A composition comprising a first nucleic acid encoding the first CAR and a second nucleic acid encoding the second CAR of any one of claims 1-51.

79. The composition of claim 78, wherein said first and said second nucleic acids are comprised within separate vectors.

80. The composition of claim 79, wherein said vectors are lentiviral vectors.

81. A method of generating the cell of any one of claims 1-57, comprising introducing into said cell the nucleic acid of any one of claims 74-75, the vector of any one of claims 76-77 or the composition of any of claims 78-80.

82. A method of generating the cell of any one of claims 1-57, comprising introducing into said cells a first vector comprising nucleic acid encoding the first CAR of any one of claims 1-51, and introducing into said cells a second vector comprising nucleic acid encoding the second CAR of any one of claims 1-51.

83. The method of claim 82, wherein said introduction of said first vector and said second vector is simultaneous.

84. The method of claim 82, wherein said introduction of said first vector and said second vector is sequential.

85. A cell comprising nucleic acid encoding the first CAR of any one of claims 1-51 and the second CAR of any one of claims 1-51.

The application's sequence listing, which the Patent Office published only in electronic form, follows.

SEQUENCE LISTING (1096 sequences)

SEQ ID NO: 1 - DNA, 1184 bp, Artificial Sequence
  source: /note="Description of Artificial Sequence: Synthetic polynucleotide"
cgtgaggctccggtgcccgtcagtgggcagagcgcacatcgcccacagtccccgagaagttggggggaggggtcggcaattgaaccggtgcctagagaaggtggcgcggggtaaactgggaaagtgatgtcgtgtactggctccgcctttttcccgagggtgggggagaaccgtatataagtgcagtagtcgccgtgaacgttctttttcgcaacgggtttgccgccagaacacaggtaagtgccgtgtgtggttcccgcgggcctggcctctttacgggttatggcccttgcgtgccttgaattacttccacctggctgcagtacgtgattcttgatcccgagcttcgggttggaagtgggtgggagagttcgaggccttgcgcttaaggagccccttcgcctcgtgcttgagttgaggcctggcctgggcgctggggccgccgcgtgcgaatctggtggcaccttcgcgcctgtctcgctgctttcgataagtctctagccatttaaaatttttgatgacctgctgcgacgctttttttctggcaagatagtcttgtaaatgcgggccaagatctgcacactggtatttcggtttttggggccgcgggcggcgacggggcccgtgcgtcccagcgcacatgttcggcgaggcggggcctgcgagcgcggccaccgagaatcggacgggggtagtctcaagctggccggcctgctctggtgcctggcctcgcgccgccgtgtatcgccccgccctgggcggcaaggctggcccggtcggcaccagttgcgtgagcggaaagatggccgcttcccggccctgctgcagggagctcaaaatggaggacgcggcgctcgggagagcgggcgggtgagtcacccacacaaaggaaaagggcctttccgtcctcagccgtcgcttcatgtgactccacggagtaccgggcgccgtccaggcacctcgattagttctcgagcttttggagtacgtcgtctttaggttggggggaggggttttatgcgatggagtttccccacactgagtgggtggagactgaagttaggccagcttggcacttgatgtaattctccttggaatttgccctttttgagtttggatcttggttcattctcaagcctcagacagtggttcaaagtttttttcttccatttcaggtgtcgtga

SEQ ID NO: 2 - protein, 21 aa, Artificial Sequence
  source: /note="Description of Artificial Sequence: Synthetic peptide"
MALPVTALLLPLALLLHAARP

SEQ ID NO: 3 - DNA, 63 bp, Artificial Sequence
  source: /note="Description of Artificial Sequence: Synthetic oligonucleotide"
atggccctgcctgtgacagccctgctgctgcctctggctctgctgctgcatgccgctagaccc

SEQ ID NO: 4 - protein, 45 aa, Artificial Sequence
  source: /note="Description of Artificial Sequence: Synthetic polypeptide"
TTTPAPRPPTPAPTIASQPLSLRPEACRPAAGGAVHTRGLDFACD

SEQ ID NO: 5 - DNA, 135 bp, Artificial Sequence
  source: /note="Description of Artificial Sequence: Synthetic polynucleotide"
accacgacgccagcgccgcgaccaccaacaccggcgcccaccatcgcgtcgcagcccctgtccctgcgcccagaggcgtgccggccagcggcggggggcgcagtgcacacgagggggctggacttcgcctgtgat

SEQ ID NO: 6 - protein, 230 aa, Artificial Sequence
  source: /note="Description of Artificial Sequence: Synthetic polypeptide"
ESKYGPPCPPCPAPEFLGGPSVFLFPPKPKDTLMISRTPEVTCVVVDVSQEDPEVQFNWYVDGVEVHNAKTKPREEQFNSTYRVVSVLTVLHQDWLNGKEYKCKVSNKGLPSSIEKTISKAKGQPREPQVYTLPPSQEEMTKNQVSLTCLVKGFYPSDIAVEWESNGQPENNYKTTPPVLDSDGSFFLYSRLTVDKSRWQEGNVFSCSVMHEALHNHYTQKSLSLSLGKM

SEQ ID NO: 7 - DNA, 690 bp, Artificial Sequence
  source: /note="Description of Artificial Sequence: Synthetic polynucleotide"
gagagcaagtacggccctccctgccccccttgccctgcccccgagttcctgggcggacccagcgtgttcctgttcccccccaagcccaaggacaccctgatgatcagccggacccccgaggtgacctgtgtggtggtggacgtgtcccaggaggaccccgaggtccagttcaactggtacgtggacggcgtggaggtgcacaacgccaagaccaagccccgggaggagcagttcaatagcacctaccgggtggtgtccgtgctgaccgtgctgcaccaggactggctgaacggcaaggaatacaagtgtaaggtgtccaacaagggcctgcccagcagcatcgagaaaaccatcagcaaggccaagggccagcctcgggagccccaggtgtacaccctgccccctagccaagaggagatgaccaagaaccaggtgtccctgacctgcctggtgaagggcttctaccccagcgacatcgccgtggagtgggagagcaacggccagcccgagaacaactacaagaccaccccccctgtgctggacagcgacggcagcttcttcctgtacagccggctgaccgtggacaagagccggtggcaggagggcaacgtctttagctgctccgtgatgcacgaggccctgcacaaccactacacccagaagagcctgagcctgtccctgggcaagatg

SEQ ID NO: 8 - protein, 282 aa, Artificial Sequence
  source: /note="Description of Artificial Sequence: Synthetic polypeptide"
RWPESPKAQASSVPTAQPQAEGSLAKATTAPATTRNTGRGGEEKKKEKEKEEQEERETKTPECPSHTQPLGVYLLTPAVQDLWLRDKATFTCFVVGSDLKDAHLTWEVAGKVPTGGVEEGLLERHSNGSQSQHSRLTLPRSLWNAGTSVTCTLNHPSLPPQRLMALREPAAQAPVKLSLNLLASSDPPEAASWLLCEVSGFSPPNILLMWLEDQREVNTSGFAPARPPPQPGSTTFWAWSVLRVPAPPSPQPATYTCVVSHEDSRTLLNASRSLEVSYVTDH

SEQ ID NO: 9 - DNA, 847 bp, Artificial Sequence
  source: /note="Description of Artificial Sequence: Synthetic polynucleotide"
aggtggcccgaaagtcccaaggcccaggcatctagtgttcctactgcacagccccaggcagaaggcagcctagccaaagctactactgcacctgccactacgcgcaatactggccgtggcggggaggagaagaaaaaggagaaagagaaagaagaacaggaagagagggagaccaagacccctgaatgtccatcccatacccagccgctgggcgtctatctcttgactcccgcagtacaggacttgtggcttagagataaggccacctttacatgtttcgtcgtgggctctgacctgaaggatgcccatttgacttgggaggttgccggaaaggtacccacagggggggttgaggaagggttgctggagcgccattccaatggctctcagagccagcactcaagactcacccttccgagatccctgtggaacgccgggacctctgtcacatgtactctaaatcatcctagcctgcccccacagcgtctgatggcccttagagagccagccgcccaggcaccagttaagcttagcctgaatctgctcgccagtagtgatcccccagaggccgccagctggctcttatgcgaagtgtccggctttagcccgcccaacatcttgctcatgtggctggaggaccagcgagaagtgaacaccagcggcttcgctccagcccggcccccaccccagccgggttctaccacattctgggcctggagtgtcttaagggtcccagcaccacctagcccccagccagccacatacacctgtgttgtgtcccatgaagatagcaggaccctgctaaatgcttctaggagtctggaggtttcctacgtgactgaccatt

SEQ ID NO: 10 - protein, 10 aa, Artificial Sequence
  source: /note="Description of Artificial Sequence: Synthetic peptide"
GGGGSGGGGS

SEQ ID NO: 11 - DNA, 30 bp, Artificial Sequence
  source: /note="Description of Artificial Sequence: Synthetic oligonucleotide"
ggtggcggaggttctggaggtggaggttcc

SEQ ID NO: 12 - protein, 24 aa, Artificial Sequence
  source: /note="Description of Artificial Sequence: Synthetic peptide"
IYIWAPLAGTCGVLLLSLVITLYC

SEQ ID NO: 13 - DNA, 72 bp, Artificial Sequence
  source: /note="Description of Artificial Sequence: Synthetic oligonucleotide"
atctacatctgggcgcccttggccgggacttgtggggtccttctcctgtcactggttatcaccctttactgc

SEQ ID NO: 14 - protein, 42 aa, Artificial Sequence
  source: /note="Description of Artificial Sequence: Synthetic polypeptide"
KRGRKKLLYIFKQPFMRPVQTTQEEDGCSCRFPEEEEGGCEL

SEQ ID NO: 15 - DNA, 126 bp, Artificial Sequence
  source: /note="Description of Artificial Sequence: Synthetic polynucleotide"
aaacggggcagaaagaaactcctgtatatattcaaacaaccatttatgagaccagtacaaactactcaagaggaagatggctgtagctgccgatttccagaagaagaagaaggaggatgtgaactg

SEQ ID NO: 16 - protein, 48 aa, Artificial Sequence
  source: /note="Description of Artificial Sequence: Synthetic polypeptide"
QRRKYRSNKGESPVEPAEPCRYSCPREEEGSTIPIQEDYRKPEPACSP

SEQ ID NO: 17 - DNA, 123 bp, Artificial Sequence
  source: /note="Description of Artificial Sequence: Synthetic polynucleotide"
aggagtaagaggagcaggctcctgcacagtgactacatgaacatgactccccgccgccccgggcccacccgcaagcattaccagccctatgccccaccacgcgacttcgcagcctatcgctcc

SEQ ID NO: 18 - protein, 112 aa, Artificial Sequence
  source: /note="Description of Artificial Sequence: Synthetic polypeptide"
RVKFSRSADAPAYKQGQNQLYNELNLGRREEYDVLDKRRGRDPEMGGKPRRKNPQEGLYNELQKDKMAEAYSEIGMKGERRRGKGHDGLYQGLSTATKDTYDALHMQALPPR

SEQ ID NO: 19 - DNA, 336 bp, Artificial Sequence
  source: /note="Description of Artificial Sequence: Synthetic polynucleotide"
agagtgaagttcagcaggagcgcagacgcccccgcgtacaagcagggccagaaccagctctataacgagctcaatctaggacgaagagaggagtacgatgttttggacaagagacgtggccgggaccctgagatggggggaaagccgagaaggaagaaccctcaggaaggcctgtacaatgaactgcagaaagataagatggcggaggcctacagtgagattgggatgaaaggcgagcgccggaggggcaaggggcacgatggcctttaccagggtctcagtacagccaccaaggacacctacgacgcccttcacatgcaggccctgccccctcgc

SEQ ID NO: 20 - protein, 112 aa, Artificial Sequence
  source: /note="Description of Artificial Sequence: Synthetic polypeptide"
RVKFSRSADAPAYQQGQNQLYNELNLGRREEYDVLDKRRGRDPEMGGKPRRKNPQEGLYNELQKDKMAEAYSEIGMKGERRRGKGHDGLYQGLSTATKDTYDALHMQALPPR

SEQ ID NO: 21 - DNA, 336 bp, Artificial Sequence
  source: /note="Description of Artificial Sequence: Synthetic polynucleotide"
agagtgaagttcagcaggagcgcagacgcccccgcgtaccagcagggccagaaccagctctataacgagctcaatctaggacgaagagaggagtacgatgttttggacaagagacgtggccgggaccctgagatggggggaaagccgagaaggaagaaccctcaggaaggcctgtacaatgaactgcagaaagataagatggcggaggcctacagtgagattgggatgaaaggcgagcgccggaggggcaaggggcacgatggcctttaccagggtctcagtacagccaccaaggacacctacgacgcccttcacatgcaggccctgccccctcgc

SEQ ID NO: 22 - protein, 5 aa, Artificial Sequence
  source: /note="Description of Artificial Sequence: Synthetic peptide"
GGGGS

SEQ ID NO: 23 - DNA, 30 bp, Artificial Sequence; identical to SEQ ID NO: 11
  source: /note="Description of Artificial Sequence: Synthetic oligonucleotide"

SEQ ID NO: 24 - protein, 150 aa, Artificial Sequence [sequence omitted]

SEQ ID NO: 25 - DNA, 450 bp, Artificial Sequence
  source: /note="Description of Artificial Sequence: Synthetic polynucleotide"
cccggatggtttctggactctccggatcgcccgtggaatcccccaaccttctcaccggcactcttggttgtgactgagggcgataatgcgaccttcacgtgctcgttctccaacacctccgaatcattcgtgctgaactggtaccgcatgagcccgtcaaaccagaccgacaagctcgccgcgtttccggaagatcggtcgcaaccgggacaggattgtcggttccgcgtgactcaactgccgaatggcagagacttccacatgagcgtggtccgcgctaggcgaaacgactccgggacctacctgtgcggagccatctcgctggcgcctaaggcccaaatcaaagagagcttgagggccgaactgagagtgaccgagcgcagagctgaggtgccaactgcacatccatccccatcgcctcggcctgcggggcagtttcagaccctggtc

SEQ ID NO: 26 - protein, 394 aa, Artificial Sequence
  source: /note="Description of Artificial Sequence: Synthetic polypeptide"
MALPVTALLLPLALLLHAARPPGWFLDSPDRPWNPPTFSPALLVVTEGDNATFTCSFSNTSESFVLNWYRMSPSNQTDKLAAFPEDRSQPGQDCRFRVTQLPNGRDFHMSVVRARRNDSGTYLCGAISLAPKAQIKESLRAELRVTERRAEVPTAHPSPSPRPAGQFQTLVTTTPAPRPPTPAPTIASQPLSLRPEACRPAAGGAVHTRGLDFACDIYIWAPLAGTCGVLLLSLVITLYCKRGRKKLLYIFKQPFMRPVQTTQEEDGCSCRFPEEEEGGCELRVKFSRSADAPAYKQGQNQLYNELNLGRREEYDVLDKRRGRDPEMGGKPRRKNPQEGLYNELQKDKMAEAYSEIGMKGERRRGKGHDGLYQGLSTATKDTYDALHMQALPPR

SEQ ID NO: 27 - DNA, 1182 bp, Artificial Sequence
  source: /note="Description of Artificial Sequence: Synthetic polynucleotide"
atggccctccctgtcactgccctgcttctccccctcgcactcctgctccacgccgctagaccacccggatggtttctggactctccggatcgcccgtggaatcccccaaccttctcaccggcactcttggttgtgactgagggcgataatgcgaccttcacgtgctcgttctccaacacctccgaatcattcgtgctgaactggtaccgcatgagcccgtcaaaccagaccgacaagctcgccgcgtttccggaagatcggtcgcaaccgggacaggattgtcggttccgcgtgactcaactgccgaatggcagagacttccacatgagcgtggtccgcgctaggcgaaacgactccgggacctacctgtgcggagccatctcgctggcgcctaaggcccaaatcaaagagagcttgagggccgaactgagagtgaccgagcgcagagctgaggtgccaactgcacatccatccccatcgcctcggcctgcggggcagtttcagaccctggtcacgaccactccggcgccgcgcccaccgactccggccccaactatcgcgagccagcccctgtcgctgaggccggaagcatgccgccctgccgccggaggtgctgtgcatacccggggattggacttcgcatgcgacatctacatttgggctcctctcgccggaacttgtggcgtgctccttctgtccctggtcatcaccctgtactgcaagcggggtcggaaaaagcttctgtacattttcaagcagcccttcatgaggcccgtgcaaaccacccaggaggaggacggttgctcctgccggttccccgaagaggaagaaggaggttgcgagctgcgcgtgaagttctcccggagcgccgacgcccccgcctataagcagggccagaaccagctgtacaacgaactgaacctgggacggcgggaagagtacgatgtgctggacaagcggcgcggccgggaccccgaaatgggcgggaagcctagaagaaagaaccctcaggaaggcctgtataacgagctgcagaaggacaagatggccgaggcctactccgaaattgggatgaagggagagcggcggaggggaaaggggcacgacggcctgtaccaaggactgtccaccgccaccaaggacacatacgatgccctgcacatgcaggcccttccccctcgc

SEQ ID NO: 28 - protein, 40 aa, Artificial Sequence
  source: /note="Description of Artificial Sequence: Synthetic polypeptide"
  MISC_FEATURE (1)..(40): /note="This sequence may encompass 1-10 'Gly Gly Gly Ser' repeating units"
GGGSGGGSGGGSGGGSGGGSGGGSGGGSGGGSGGGSGGGS

SEQ ID NO: 29 - protein, 20 aa, Artificial Sequence
  source: /note="Description of Artificial Sequence: Synthetic peptide"
GGGGSGGGGSGGGGSGGGGS

SEQ ID NO: 30 - protein, 15 aa, Artificial Sequence
  source: /note="Description of Artificial Sequence: Synthetic peptide"
GGGGSGGGGSGGGGS

SEQ ID NO: 31 - protein, 4 aa, Artificial Sequence
  source: /note="Description of Artificial Sequence: Synthetic peptide"
GGGS

SEQ ID NO: 32 - DNA, 2000 bp, Artificial Sequence
  source: /note="Description of Artificial Sequence: Synthetic polynucleotide"
  misc_feature (1)..(2000): /note="This sequence may encompass 50-2000 nucleotides"
  source: /note="See specification as filed for detailed description of substitutions and preferred embodiments"
aaaaaaaaaaaaaaaaaaaaaaaaaaaaaaaaaaaaaaaaaaaaaaaaaaaaaaaaaaaaaaaaaaaaaaaaaaaaaaaaaaaaaaaaaaaaaaaaaaaaaaaaaaaaaaaaaaaaaaaaaaaaaaaaaaaaaaaaaaaaaaaaaaaaaaaaaaaaaaaaaaaaaaaaaaaaaaaaaaaaaaaaaaaaaaaaaaaaaaaaaaaaaaaaaaaaaaaaaaaaaaaaaaaaaaaaaaaaaaaaaaaaaaaaaaaaaaaaaaaaaaaaaaaaaaaaaaaaaaaaaaaaaaaaaaaaaaaaaaaaaaaaaaaaaaaaaaaaaaaaaaaaaaaaaaaaaaaaaaaaaaaaaaaaaaaaaaaaaaaaaaaaaaaaaaaaaaaaaaaaaaaaaaaaaaaaaaaaaaaaaaaaaaaaaaaaaaaaaaaaaaaaaaaaaaaaaaaaaaaaaaaaaaaaaaaaaaaaaaaaaaaaaaaaaaaaaaaaaaaaaaaaaaaaaaaaaaaaaaaaaaaaaaaaaaaaaaaaaaaaaaaaaaaaaaaaaaaaaaaaaaaaaaaaaaaaaaaaaaaaaaaaaaaaaaaaaaaaaaaaaaaaaaaaaaaaaaaaaaaaaaaaaaaaaaaaaaaaaaaaaaaaaaaaaaaaaaaaaaaaaaaaaaaaaaaaaaaaaaaaaaaaaaaaaaaaaaaaaaaaaaaaaaaaaaaaaaaaaaaaaaaaaaaaaaaaaaaaaaaaaaaaaaaaaaaaaaaaaaaaaaaaaaaaaaaaaaaaaaaaaaaaaaaaaaaaaaaaaaaaaaaaaaaaaaaaaaaaaaaaaaaaaaaaaaaaaaaaaaaaaaaaaaaaaaaaaaaaaaaaaaaaaaaaaaaaaaaaaaaaaaaaaaaaaaaaaaaaaaaaaaaaaaaaaaaaaaaaaaaaaaaaaaaaaaaaaaaaaaaaaaaaaaaaaaaaaaaaaaaaaaaaaaaaaaaaaaaaaaaaaaaaaaaaaaaaaaaaaaaaaaaaaaaaaaaaaaaaaaaaaaaaaaaaaaaaaaaaaaaaaaaaaaaaaaaaaaaaaaaaaaaaaaaaaaaaaaaaaaaaaaaaaaaaaaaaaaaaaaaaaaaaaaaaaaaaaaaaaaaaaaaaaaaaaaaaaaaaaaaaaaaaaaaaaaaaaaaaaaaaaaaaaaaaaaaaaaaaaaaaaaaaaaaaaaaaaaaaaaaaaaaaaaaaaaaaaaaaaaaaaaaaaaaaaaaaaaaaaaaaaaaaaaaaaaaaaaaaaaaaaaaaaaaaaaaaaaaaaaaaaaaaaaaaaaaaaaaaaaaaaaaaaaaaaaaaaaaaaaaaaaaaaaaaaaaaaaaaaaaaaaaaaaaaaaaaaaaaaaaaaaaaaaaaaaaaaaaaaaaaaaaaaaaaaaaaaaaaaaaaaaaaaaaaaaaaaaaaaaaaaaaaaaaaaaaaaaaaaaaaaaaaaaaaaaaaaaaaaaaaaaaaaaaaaaaaaaaaaaaaaaaaaaaaaaaaaaaaaaaaaaaaaaaaaaaaaaaaaaaaaaaaaaaaaaaaaaaaaaaaaaaaaaaaaaaaaaaaaaaaaaaaaaaaaaaaaaaaaaaaaaaaaaaaaaaaaaaaaaaaaaaaaaaaaaaaaaaaaaaaaaaaaaaaaaaaaaaaaaaaaaaaaaaaaaaaaaaaaaaaaaaaaaaaaaaaaaaaaaaaaaaaaaaaaaaaaaaaaaaaaaaaaaaaaaaaaaaaaaaaaaaaaaaaaaaaaaaaaaaaaaaaaaaaaaaaaaaaaaaaaaaaaaaaaaaaaaaaaaaaaaaaaaaaaaaaaaaaaaaaaaaaaaaaaaaaaaaaaaaaaaaaaaaaaaaaaaaaaaaaaaaaaaaaaaaaaaaaaaaaaaaaaaaaaaaaaaaaaaaaaaaaaaaaaaaaaaaaaaaaaaaaaaaaaaaaaaaaaaaaaaaaaaaaaaaaaaaaaaaaaaaaaaaaaaaaaaaaaaaaaaaaaaaaaaaaaaaaaaaaaaaaaaaaaaaaaaaaaaaaaaaaaaaaaaaaaaaaaaaa

SEQ ID NO: 33 - DNA, 150 bp, Artificial Sequence
  source: /note="Description of Artificial Sequence: Synthetic polynucleotide"
aaaaaaaaaaaaaaaaaaaaaaaaaaaaaaaaaaaaaaaaaaaaaaaaaaaaaaaaaaaaaaaaaaaaaaaaaaaaaaaaaaaaaaaaaaaaaaaaaaaaaaaaaaaaaaaaaaaaaaaaaaaaaaaaaaaaaaaaaaaaaaaaaaaaaa

SEQ ID NO: 34 - DNA, 5000 bp, Artificial Sequence
  source: /note="Description of Artificial Sequence: Synthetic polynucleotide"
  misc_feature (1)..(5000): /note="This sequence may encompass 50-5000 nucleotides"
  source: /note="See specification as filed for detailed description of substitutions and preferred embodiments"
aaaaaaaaaaaaaaaaaaaaaaaaaaaaaaaaaaaaaaaaaaaaaaaaaaaaaaaaaaaaaaaaaaaaaaaaaaaaaaaaaaaaaaaaaaaaaaaaaaaaaaaaaaaaaaaaaaaaaaaaaaaaaaaaaaaaaaaaaaaaaaaaaaaaaaaaaaaaaaaaaaaaaaaaaaaaaaaaaaaaaaaaaaaaaaaaaaaaaaaaaaaaaaaaaaaaaaaaaaaaaaaaaaaaaaaaaaaaaaaaaaaaaaaaaaaaaaaaaaaaaaaaaaaaaaaaaaaaaaaaaaaaaaaaaaaaaaaaaaaaaaaaaaaaaaaaaaaaaaaaaaaaaaaaaaaaaaaaaaaaaaaaaaaaaaaaaaaaaaaaaaaaaaaaaaaaaaaaaaaaaaaaaaaaaaaaaaaaaaaaaaaaaaaaaaaaaaaaaaaaaaaaaaaaaaaaaaaaaaaaaaaaaaaaaaaaaaaaaaaaaaaaaaaaaaaaaaaaaaaaaaaaaaaaaaaaaaaaaaaaaaaaaaaaaaaaaaaaaaaaaaaaaaaaaaaaaaaaaaaaaaaaaaaaaaaaaaaaaaaaaaaaaaaaaaaaaaaaaaaaaaaaaaaaaaaaaaaaaaaaaaaaaaaaaaaaaaaaaaaaaaaaaaaaaaaaaaaaaaaaaaaaaaaaaaaaaaaaaaaaaaaaaaaaaaaaaaaaaaaaaaaaaaaaaaaaaaaaaaaaaaaaaaaaaaaaaaaaaaaaaaaaaaaaaaaaaaaaaaaaaaaaaaaaaaaaaaaaaaaaaaaaaaaaaaaaaaaaaaaaaaaaaaaaaaaaaaaaaaaaaaaaaaaaaaaaaaaaaaaaaaaaaaaaaaaaaaaaaaaaaaaaaaaaaaaaaaaaaaaaaaaaaaaaaaaaaaaaaaaaaaaaaaaaaaaaaaaaaaaaaaaaaaaaaaaaaaaaaaaaaaaaaaaaaaaaaaaaaaaaaaaaaaaaaaaaaaaaaaaaaaaaaaaaaaaaaaaaaaaaaaaaaaaaaaaaaaaaaaaaaaaaaaaaaaaaaaaaaaaaaaaaaaaaaaaaaaaaaaaaaaaaaaaaaaaaaaaaaaaaaaaaaaaaaaaaaaaaaaaaaaaaaaaaaaaaaaaaaaaaaaaaaaaaaaaaaaaaaaaaaaaaaaaaaaaaaaaaaaaaaaaaaaaaaaaaaaaaaaaaaaaaaaaaaaaaaaaaaaaaaaaaaaaaaaaaaaaaaaaaaaaaaaaaaaaaaaaaaaaaaaaaaaaaaaaaaaaaaaaaaaaaaaaaaaaaaaaaaaaaaaaaaaaaaaaaaaaaaaaaaaaaaaaaaaaaaaaaaaaaaaaaaaaaaaaaaaaaaaaaaaaaaaaaaaaaaaaaaaaaaaaaaaaaaaaaaaaaaaaaaaaaaaaaaaaaaaaaaaaaaaaaaaaaaaaaaaaaaaaaaaaaaaaaaaaaaaaaaaaaaaaaaaaaaaaaaaaaaaaaaaaaaaaaaaaaaaaaaaaaaaaaaaaaaaaaaaaaaaaaaaaaaaaaaaaaaaaaaaaaaaaaaaaaaaaaaaaaaaaaaaaaaaaaaaaaaaaaaaaaaaaaaaaaaaaaaaaaaaaaaaaaaaaaaaaaaaaaaaaaaaaaaaaaaaaaaaaaaaaaaaaaaaaaaaaaaaaaaaaaaaaaaaaaaaaaaaaaaaaaaaaaaaaaaaaaaaaaaaaaaaaaaaaaaaaaaaaaaaaaaaaaaaaaaaaaaaaaaaaaaaaaaaaaaaaaaaaaaaaaaaaaaaaaaaaaaaaaaaaaaaaaaaaaaaaaaaaaaaaaaaaaaaaaaaaaaaaaaaaaaaaaaaaaaaaaaaaaaaaaaaaaaaaaaaaaaaaaaaaaaaaaaaaaaaaaaaaaaaaaaaaaaaaaaaaaaaaaaaaaaaaaaaaaaaaaaaaaaaaaaaaaaaaaaaaaaaaaaaaaaaaaaaaaaaaaaaaaaaaaaaaaaaaaaaaaaaaaaaaaaaaaaaaaaaaaaaaaaaaaaaaaaaaaaaaaaaaaaaaaaaaaaaaaaaaaaaaaaaaaaaaaaaaaaaaaaaaaaaaaaaaaaaaaaaaaaaaaaaaaaaaaaaaaaaaaaaaaaaaaaaaaaaaaaaaaaaaaaaaaaaaaaaaaaaaaaaaaaaaaaaaaaaaaaaaaaaaaaaaaaaaaaaaaaaaaaaaaaaaaaaaaaaaaaaaaaaaaaaaaaaaaaaaaaaaaaaaaaaaaaaaaaaaaaaaaaaaaaaaaaaaaaaaaaaaaaaaaaaaaaaaaaaaaaaaaaaaaaaaaaaaaaaaaaaaaaaaaaaaaaaaaaaaaaaaaaaaaaaaaaaaaaaaaaaaaaaaaaaaaaaaaaaaaaaaaaaaaaaaaaaaaaaaaaaaaaaaaaaaaaaaaaaaaaaaaaaaaaaaaaaaaaaaaaaaaaaaaaaaaaaaaaaaaaaaaaaaaaaaaaaaaaaaaaaaaaaaaaaaaaaaaaaaaaaaaaaaaaaaaaaaaaaaaaaaaaaaaaaaaaaaaaaaaaaaaaaaaaaaaaaaaaaaaaaaaaaaaaaaaaaaaaaaaaaaaaaaaaaaaaaaaaaaaaaaaaaaaaaaaaaaaaaaaaaaaaaaaaaaaaaaaaaaaaaaaaaaaaaaaaaaaaaaaaaaaaaaaaaaaaaaaaaaaaaaaaaaaaaaaaaaaaaaaaaaaaaaaaaaaaaaaaaaaaaaaaaaaaaaaaaaaaaaaaaaaaaaaaaaaaaaaaaaaaaaaaaaaaaaaaaaaaaaaaaaaaaaaaaaaaaaaaaaaaaaaaaaaaaaaaaaaaaaaaaaaaaaaaaaaaaaaaaaaaaaaaaaaaaaaaaaaaaaaaaaaaaaaaaaaaaaaaaaaaaaaaaaaaaaaaaaaaaaaaaaaaaaaaaaaaaaaaaaaaaaaaaaaaaaaaaaaaaaaaaaaaaaaaaaaaaaaaaaaaaaaaaaaaaaaaaaaaaaaaaaaaaaaaaaaaaaaaaaaaaaaaaaaaaaaaaaaaaaaaaaaaaaaaaaaaaaaaaaaaaaaaaaaaaaaaaaaaaaaaaaaaaaaaaaaaaaaaaaaaaaaaaaaaaaaaaaaaaaaaaaaaaaaaaaaaaaaaaaaaaaaaaaaaaaaaaaaaaaaaaaaaaaaaaaaaaaaaaaaaaaaaaaaaaaaaaaaaaaaaaaaaaaaaaaaaaaaaaaaaaaaaaaaaaaaaaaaaaaaaaaaaaaaaaaaaaaaaaaaaaaaaaaaaaaaaaaaaaaaaaaaaaaaaaaaaaaaaaaaaaaaaaaaaaaaaaaaaaaaaaaaaaaaaaaaaaaaaaaaaaaaaaaaaaaaaaaaaaaaaaaaaaaaaaaaaaaaaaaaaaaaaaaaaaaaaaaaaaaaaaaaaaaaaaaaaaaaaaaaaaaaaaaaaaaaaaaaaaaaaaaaaaaaaaaaaaaaaaaaaaaaaaaaaaaaaaaaaaaaaaaaaaaaaaaaaaaaaaaaaaaaaaaaaaaaaaaaaaaaaaaaaaaaaaaaaaaaaaaaaaaaaaaaaaaaaaaaaaaaaaaaaaaaaaaaaaaaaaaaaaaaaaaaaaaaaaaaaaaaaaaaaaaaaaaaaaaaaaaaaaaaaaaaaaaaaaaaaaaaaaaaaaaaaaaaaaaaaaaaaaaaaaaaaaaaaaaaaaaaaaaaaaaaaaaaaaaaaaaaaaaaaaaaaaaaaaaaaaaaaaaaaaaaaaaaaaaaaaaaaaaaaaaaaaaaaaaaaaaaaaaaaaaaaaaaaaaaaaaaaaaaaaaaaaaaaaaaaaaaaaaaaaaaaaaaaaaaaaaaaaaaaaaaaaaaaaaaaaaaaaaaaaaaaaaaaaaaaaaaaaaaaaaaaaaaaaaaaaaaaaaaaaaaaaaaaaaaaaaaaaaaaaaaaaaaaaaaaaaaaaaaaaaaaaaaaaaaaaaaaaaaaaaaaaaaaaaaaaaaaaaaaaaaaaaaaaaaaaaaaaaaaaaaaaaaaaaaaaaaaaaaaaaaaaaaaaaaaaaaaaaaaaaaaaaaaaaaaaaaaaaaaaaaaaaaaaaaaaaaaaaaaaaaaaaaaaaaaaaaaaaaaaaaaaaaaaaaaaaaaaaaaaaaaaaaaaaaaaaaaaaaaaaaaaaaaaaaaaaaaaaaaaaaaaaaaaaaaaaaaaaaaaaaaaaaaaaaaaaaaaaaaaaaaaaaaaaaaaaaaaaaaaaaaaaaaaaaaaaaaaaaaaaaaaaaaaaaaaaaaaaaaaaaaaaaaaaaaaaaaaaaaaaaaaaaaaaaaaaaaaaaaaaaaaaaaaaaaaaaaaaaaaaaaaaaaaaaaaaaaaaaaaaaaaaaaaaaaaaaaaaaaaaaaaaaaaaaaaaaaaaaaaaaaaaaaaaaaaaaaaaaaaaaaaaaaaaaaaaaaaaaaaaaaaaaaaaaaaaaaaaaaaaaaaaaaaaaaaaaaaaaaaaaaaaaaaaaaaaaaaaaaaaaaaaaaaaaaaaaaaaaaaaaaaaaaaaaaaaaaaaaaaaaaaaaaaaaaaaaaaaaaaaaaaaaaaaaaaaaaaaaaaaaaaaaaaaaaaaaaaaaaaaaaaaaaaaaaaaaaaaaaaaaaaaaaaaaaaaaaaaaaaaaaaaaaaaaaaaaaaaaaaaaaaaaaaaaaaaaaaaaaaaaaaaaaaaaaaaaaaaaaaaaaaaaaaaaaaaaaaaaaaaaaaaaaaaaaaaaaaaaaaaaaaaaaaaaaaaaaaaaaaaaaaaaaaaaaaaaaaaaaaaaaaaaaaaaaaaaaaaaaaaaaaaaaaaaaaaaaaaaaaaaaaaaaaaaaaaaaaaaaaaaaaaaaaaaaaaaaaaaaaaaaaaaaaaaaaaaaaaaaaaaaaaaaaaaaaaaaaaaaaaaaaaaaaaaaaaaaaaaaaaaaaaaaaaaaaaaaaaaaaaaaaaaaaaaaaaaaaaaaaaaaaaaaaaaaaaaaaaaaaaaaaaaaaaaaaaaaaaaaaaaaaaaaaaaaaaaaaaaaaaaaaaaaaaaaaaaaaaaaaaaaaaaaaaaaaaaaaaaaaaaaaaaaaaaaaaaaaaaaaaaaaaaaaaaaaaaaaaaaaaaaaaaaaaaaaaaaaaaaaaaaaaa

SEQ ID NO: 35 - DNA, 100 bp, Artificial Sequence
  source: /note="Description of Artificial Sequence: Synthetic polynucleotide"
tttttttttttttttttttttttttttttttttttttttttttttttttttttttttttttttttttttttttttttttttttttttttttttttttttt

SEQ ID NO: 36 - DNA, 500 bp, Artificial Sequence
  source: /note="Description of Artificial Sequence: Synthetic polynucleotide"
tttttttttttttttttttttttttttttttttttttttttttttttttttttttttttttttttttttttttttttttttttttttttttttttttttttttttttttttttttttttttttttttttttttttttttttttttttttttttttttttttttttttttttttttttttttttttttttttttttttttttttttttttttttttttttttttttttttttttttttttttttttttttttttttttttttttttttttttttttttttttttttttttttttttttttttttttttttttttttttttttttttttttttttttttttttttttttttttttttttttttttttttttttttttttttttttttttttttttttttttttttttttttttttttttttttttttttttttttttttttttttttttttttttttttttttttttttttttttttttttttttttttttttttttttttt

SEQ ID NO: 37 - DNA, 64 bp, Artificial Sequence
  source: /note="Description of Artificial Sequence: Synthetic oligonucleotide"
aaaaaaaaaaaaaaaaaaaaaaaaaaaaaaaaaaaaaaaaaaaaaaaaaaaaaaaaaaaaaaaa

SEQ ID NO: 38 - DNA, 400 bp, Artificial Sequence
  source: /note="Description of Artificial Sequence: Synthetic polynucleotide"
  misc_feature (1)..(400): /note="This sequence may encompass 100-400 nucleotides"
  source: /note="See specification as filed for detailed description of substitutions and preferred embodiments"
aaaaaaaaaaaaaaaaaaaaaaaaaaaaaaaaaaaaaaaaaaaaaaaaaaaaaaaaaaaaaaaaaaaaaaaaaaaaaaaaaaaaaaaaaaaaaaaaaaaaaaaaaaaaaaaaaaaaaaaaaaaaaaaaaaaaaaaaaaaaaaaaaaaaaaaaaaaaaaaaaaaaaaaaaaaaaaaaaaaaaaaaaaaaaaaaaaaaaaaaaaaaaaaaaaaaaaaaaaaaaaaaaaaaaaaaaaaaaaaaaaaaaaaaaaaaaaaaaaaaaaaaaaaaaaaaaaaaaaaaaaaaaaaaaaaaaaaaaaaaaaaaaaaaaaaaaaaaaaaaaaaaaaaaaaaaaaaaaaaaaaaaaaaaaaaaaaaaaaaaaaaaaaaaaaaaaaaaaaaaaaaaaaaaaaaaaaaaaaaa

SEQ ID NO: 39 - protein, 373 aa, Artificial Sequence
  source: /note="Description of Artificial Sequence: Synthetic polypeptide"
PGWFLDSPDRPWNPPTFSPALLVVTEGDNATFTCSFSNTSESFVLNWYRMSPSNQTDKLAAFPEDRSQPGQDCRFRVTQLPNGRDFHMSVVRARRNDSGTYLCGAISLAPKAQIKESLRAELRVTERRAEVPTAHPSPSPRPAGQFQTLVTTTPAPRPPTPAPTIASQPLSLRPEACRPAAGGAVHTRGLDFACDIYIWAPLAGTCGVLLLSLVITLYCKRGRKKLLYIFKQPFMRPVQTTQEEDGCSCRFPEEEEGGCELRVKFSRSADAPAYKQGQNQLYNELNLGRREEYDVLDKRRGRDPEMGGKPRRKNPQEGLYNELQKDKMAEAYSEIGMKGERRRGKGHDGLYQGLSTATKDTYDALHMQALPPR

SEQ ID NO: 40 - protein, 35 aa, Artificial Sequence
  source: /note="Description of Artificial Sequence: Synthetic polypeptide"
TKKKYSSSVHDPNGEYMFMRAVNTAKKSRLTDVTL

SEQ ID NO: 41 - DNA, 105 bp, Artificial Sequence
  source: /note="Description of Artificial Sequence: Synthetic polynucleotide"
acaaaaaagaagtattcatccagtgtgcacgaccctaacggtgaatacatgttcatgagagcagtgaacacagccaaaaaatccagactcacagatgtgacccta

SEQ ID NO: 42 - protein, 69 aa, Artificial Sequence
  source: /note="Description of Artificial Sequence: Synthetic polypeptide"
TTTPAPRPPTPAPTIASQPLSLRPEACRPAAGGAVHTRGLDFACDFWLPIGCAAFVVVCILGCILICWL

SEQ ID NO: 43 - DNA, 207 bp, Artificial Sequence
  source: /note="Description of Artificial Sequence: Synthetic polynucleotide"
accacgacgccagcgccgcgaccaccaacaccggcgcccaccatcgcgtcgcagcccctgtccctgcgcccagaggcgtgccggccagcggcggggggcgcagtgcacacgagggggctggacttcgcctgtgatttctggttacccataggatgtgcagcctttgttgtagtctgcattttgggatgcatacttatttgttggctt

SEQ ID NO: 44 - protein, 41 aa, Artificial Sequence
  source: /note="Description of Artificial Sequence: Synthetic polypeptide"
RSKRSRLLHSDYMNMTPRRPGPTRKHYQPYAPPRDFAAYRS

SEQ ID NO: 45 - DNA, 123 bp, Artificial Sequence; identical to SEQ ID NO: 17
  source: /note="Description of Artificial Sequence: Synthetic polynucleotide"

SEQ ID NO: 46 - protein, 239 aa, Artificial Sequence
  source: /note="Description of Artificial Sequence: Synthetic polypeptide"
QVQLQQSGPELEKPGASVKISCKASGYSFTGYTMNWVKQSHGKSLEWIGLITPYNGASSYNQKFRGKATLTVDKSSSTAYMDLLSLTSEDSAVYFCARGGYDGRGFDYWGQGTTVTVSSGGGGSGGGGSGGGGSDIELTQSPAIMSASPGEKVTMTCSASSSVSYMHWYQQKSGTSPKRWIYDTSKLASGVPGRFSGSGSGNSYSLTISSVEAEDDATYYCQQWSGYPLTFGAGTKLEI

SEQ ID NO: 47 - protein, 244 aa, Artificial Sequence
  source: /note="Description of Artificial Sequence: Synthetic polypeptide"
QVQLQQSGAEVKKPGASVKVSCKASGYTFTGYYMHWVRQAPGQGLEWMGRINPNSGGTNYAQKFQGRVTMTRDTSISTAYMELSRLRSEDTAVYYCARGRYYGMDVWGQGTMVTVSSGGGGSGGGGSGGGGSGGGGSEIVLTQSPATLSLSPGERATISCRASQSVSSNFAWYQQRPGQAPRLLIYDASNRATGIPPRFSGSGSGTDFTLTISSLEPEDFAAYYCHQRSNWLYTFGQGTKVDIK

SEQ ID NO: 48 - protein, 253 aa, Artificial Sequence
  source: /note="Description of Artificial Sequence: Synthetic polypeptide"
QVQLVQSGAEVKKPGASVKVSCKASGYTFTGYYMHWVRQAPGQGLEWMGWINPNSGGTNYAQKFQGRVTMTRDTSISTAYMELSRLRSDDTAVYYCARDLRRTVVTPRAYYGMDVWGQGTTVTVSSGGGGSGGGGSGGGGSGGGGSDIQLTQSPSTLSASVGDRVTITCQASQDISNSLNWYQQKAGKAPKLLIYDASTLETGVPSRFSGSGSGTDFSFTISSLQPEDIATYYCQQHDNLPLTFGQGTKVEIK

SEQ ID NO: 49 - protein, 246 aa, Artificial Sequence
  source: /note="Description of Artificial Sequence: Synthetic polypeptide"
QVQLVQSGAEVKKPGAPVKVSCKASGYTFTGYYMHWVRQAPGQGLEWMGWINPNSGGTNYAQKFQGRVTMTRDTSISTAYMELSRLRSDDTAVYYCARGEWDGSYYYDYWGQGTLVTVSSGGGGSGGGGSGGGGSGGGGSDIVLTQTPSSLSASVGDRVTITCRASQSINTYLNWYQHKPGKAPKLLIYAASSLQSGVPSRFSGSGSGTDFTLTISSLQPEDFATYYCQQSFSPLTFGGGTKLEIK

SEQ ID NO: 50 - protein, 242 aa, Artificial Sequence
  source: /note="Description of Artificial Sequence: Synthetic polypeptide"
QVQLVESGGGLVQPGGSLRLSCAASGFTFSSYWMHWVRQVPGKGLVWVSRINTDGSTTTYADSVEGRFTISRDNAKNTLYLQMNSLRDDDTAVYYCVGGHWAVWGQGTTVTVSSGGGGSGGGGSGGGGSGGGGSDIQMTQSPSTLSASVGDRVTITCRASQSISDRLAWYQQKPGKAPKLLIYKASSLESGVPSRFSGSGSGTEFTLTISSLQPDDFAVYYCQQYGHLPMYTFGQGTKVEIK

SEQ ID NO: 51 - protein, 241 aa, Artificial Sequence
  source: /note="Description of Artificial Sequence: Synthetic polypeptide"
QVQLVQSGAEVEKPGASVKVSCKASGYTFTDYYMHWVRQAPGQGLEWMGWINPNSGGTNYAQKFQGRVTMTRDTSISTAYMELSRLRSDDTAVYYCASGWDFDYWGQGTLVTVSSGGGGSGGGGSGGGGSGGGGSDIVMTQSPSSLSASVGDRVTITCRASQSIRYYLSWYQQKPGKAPKLLIYTASILQNGVPSRFSGSGSGTDFTLTISSLQPEDFATYYCLQTYTTPDFGPGTKVEIK

SEQ ID NO: 52 - protein, 252 aa, Artificial Sequence
  source: /note="Description of Artificial Sequence: Synthetic polypeptide"
QVQLVQSGAEVKKPGASVKVSCKASGYTFTSYYMHWVRQAPGQGLEWMGIINPSGGSTSYAQKFQGRVTMTRDTSTSTVYMELSSLRSEDTAVYYCARYRLIAVAGDYYYYGMDVWGQGTMVTVSSGGGGSGGGGSGGGGSGGGGSDIQMTQSPSSVASVGDRVTITCRASQGVGRWLAWYQQKPGTAPKLLIYAASTLQSGVPSRFSGSGSGTDFTLTINNLQPEDFATYYCQQANSFPLTFGGGTRLEIK

SEQ ID NO: 53 - protein, 250 aa, Artificial Sequence
  source: /note="Description of Artificial Sequence: Synthetic polypeptide"
QVQLVQSGGGVVQPGRSLRLSCAASGFTFSSYAMHWVRQAPGKGLEWVAVISYDGSNKYYADSVKGRFTISRDNSKNTLYLQMNSLRAEDTAVYYCARWKVSSSSPAFDYWGQGTLVTVSSGGGGSGGGGSGGGGSGGGGSEIVLTQSPATLSLSPGERAILSCRASQSVYTKYLGWYQQKPGQAPRLLIYDASTRATGIPDRFSGSGSGTDFTLTINRLEPEDFAVYYCQHYGGSPLITFGQGTRLEIK

SEQ ID NO: 54 - protein, 246 aa, Artificial Sequence
  source: /note="Description of Artificial Sequence: Synthetic polypeptide"
QVQLQQSGAEVKKPGASVKVSCKTSGYPFTGYSLHWVRQAPGQGLEWMGWINPNSGGTNYAQKFQGRVTMTRDTSISTAYMELSRLRSDDTAVYYCARDHYGGNSLFYWGQGTLVTVSSGGGGSGGGGSGGGGSGGGGSDIQLTQSPSSISASVGDTVSITCRASQDSGTWLAWYQQKPGKAPNLLMYDASTLEDGVPSRFSGSASGTEFTLTVNRLQPEDSATYYCQQYNSYPLTFGGGTKVDIK

SEQ ID NO: 55 - protein, 248 aa, Artificial Sequence
  source: /note="Description of Artificial Sequence: Synthetic polypeptide"
QVQLVQSGAEVKKPGASVEVSCKASGYTFTSYYMHWVRQAPGQGLEWMGIINPSGGSTGYAQKFQGRVTMTRDTSTSTVHMELSSLRSEDTAVYYCARGGYSSSSDAFDIWGQGTMVTVSSGGGGSGGGGSGGGGSGGGGSDIQMTQSPPSLSASVGDRVTITCRASQDISSALAWYQQKPGTPPKLLIYDASSLESGVPSRFSGSGSGTDFTLTISSLQPEDFATYYCQQFSSYPLTFGGGTRLEIK

SEQ ID NO: 56 - protein, 255 aa, Artificial Sequence
  source: /note="Description of Artificial Sequence: Synthetic polypeptide"
QVQLVQSGAEVKKPGASVKVSCKASGYTFTSYGISWVRQAPGQGLEWMGWISAYNGNTNYAQKLQGRVTMTTDTSTSTAYMELRSLRSDDTAVYYCARVAGGIYYYYGMDVWGQGTTITVSSGGGGSGGGGSGGGGSGGGGSDIVMTQTPDSLAVSLGERATISCKSSHSVLYNRNNKNYLAWYQQKPGQPPKLLFYWASTRKSGVPDRFSGSGSGTDFTLTISSLQPEDFATYFCQQTQTFPLTFGQGTRLEIN

SEQ ID NO: 57 - protein, 241 aa, Artificial Sequence
  source: /note="Description of Artificial Sequence: Synthetic polypeptide"
QVQLQQSGAEVKKPGASVKVSCKASGYTFTGYYMHWVRQAPGQGLEWMGWINPNSGGTNYAQNFQGRVTMTRDTSISTAYMELRRLRSDDTAVYYCASGWDFDYWGQGTLVTVSSGGGGSGGGGSGGGGSGGGGSDIRMTQSPSSLSASVGDRVTITCRASQSIRYYLSWYQQKPGKAPKLLIYTASILQNGVPSRFSGSGSGTDFTLTISSLQPEDFATYYCLQTYTTPDFGPGTKVEIK

SEQ ID NO: 58 - protein, 246 aa, Artificial Sequence
  source: /note="Description of Artificial Sequence: Synthetic polypeptide"
QVQLVQSGAEVKKPGASVKVSCKASGYTFTGYYMHWVRQAPGQGLEWMGRINPNSGGTNYAQKFQGRVTMTTDTSTSTAYMELRSLRSDDTAVYYCARTTTSYAFDIWGQGTMVTVSSGGGGSGGGGSGGGGSGGGGSDIQLTQSPSTLSASVGDRVTITCRASQSISTWLAWYQQKPGKAPNLLIYKASTLESGVPSRFSGSGSGTEFTLTISSLQPDDFATYYCQQYNTYSPYTFGQGTKLEIK

SEQ ID NO: 59 - protein, 249 aa, Artificial Sequence
  source: /note="Description of Artificial Sequence: Synthetic polypeptide"
QVQLVQSGGGLVKPGGSLRLSCEASGFIFSDYYMGWIRQAPGKGLEWVSYIGRSGSSMYYADSVKGRFTFSRDNAKNSLYLQMNSLRAEDTAVYYCAASPVVAATEDFQHWGQGTLVTVSSGGGGSGGGGSGGGGSGGGGSDIVMTQTPATLSLSPGERATLSCRASQSVTSNYLAWYQQKPGQAPRLLLFGASTRATGIPDRFSGSGSGTDFTLTINRLEPEDFAMYYCQQYGSAPVTFGQGTKLEIK

SEQ ID NO: 60 - protein, 249 aa, Artificial Sequence
  source: /note="Description of Artificial Sequence: Synthetic polypeptide"
QVQLVQSGAEVRAPGASVKISCKASGFTFRGYYIHWVRQAPGQGLEWMGIINPSGGSRAYAQKFQGRVTMTRDTSTSTVYMELSSLRSDDTAMYYCARTASCGGDCYYLDYWGQGTLVTVSSGGGGSGGGGSGGGGSGGGGSDIQMTQSPPTLSASVGDRVTITCRASENVNIWLAWYQQKPGKAPKLLIYKSSSLASGVPSRFSGSGSGAEFTLTISSLQPDDFATYYCQQYQSYPLTFGGGTKVDIK

SEQ ID NO: 61 - protein, 244 aa, Artificial Sequence
  source: /note="Description of Artificial Sequence: Synthetic polypeptide"
QVQLVQSGGGLVQPGRSLRLSCAASGFTFDDYAMHWVRQAPGKGLEWVSGISWNSGSIGYADSVKGRFTISRDNAKNSLYLQMNSLRAEDTAVYYCAKDGSSSWSWGYFDYWGQGTLVTVSSGGGGSGGGGSGGGGSSSELTQDPAVSVALGQTVRTTCQGDALRSYYASWYQQKPGQAPMLVIYGKNNRPSGIPDRFSGSDSGDTASLTITGAQAEDEADYYCNSRDSSGYPVFGTGTKVTVL

SEQ ID NO: 62 - protein, 246 aa, Artificial Sequence
  source: /note="Description of Artificial Sequence: Synthetic polypeptide"
EVQLVESGGGLVQPGRSLRLSCAASGFTFDDYAMHWVRQAPGKGLEWVSGISWNSGSTGYADSVKGRFTISRDNAKNSLYLQMNSLRAEDTALYYCAKDSSSWYGGGSAFDIWGQGTMVTVSSGGGGSGGGGSGGGGSSSELTQEPAVSVALGQTVRITCQGDSLRSYYASWYQQKPGQAPVLVIFGRSRRPSGIPDRFSGSSSGNTASLIITGAQAEDEADYYCNSRDNTANHYVFGTGTKLTVL

SEQ ID NO: 63 - protein, 246 aa, Artificial Sequence
  source: /note="Description of Artificial Sequence: Synthetic polypeptide"
EVQLVESGGGLVQPGRSLRLSCAASGFTFDDYAMHWVRQAPGKGLEWVSGISWNSGSTGYADSVKGRFTISRDNAKNSLYLQMNSLRAEDTALYYCAKDSSSWYGGGSAFDIWGQGTMVTVSSGGGGSGGGGSGGGGSSSELTQDPAVSVALGQTVRITCQGDSLRSYYASWYQQKPGQAPVLVIYGKNNRPSGIPDRFSGSSSGNTASLTITGAQAEDEADYYCNSRGSSGNHYVFGTGTKVTVL

SEQ ID NO: 64 - protein, 251 aa, Artificial Sequence
  source: /note="Description of Artificial Sequence: Synthetic polypeptide"
QVQLVQSGGGLVQPGGSLRLSCAASGFTFSSYWMHWVRQAPGKGLVWVSRINSDGSSTSYADSVKGRFTISRDNAKNTLYLQMNSLRAEDTAVYYCVRTGWVGSYYYYMDVWGKGTTVTVSSGGGGSGGGGSGGGGSGGGGSEIVLTQSPGTLSLSPGERATLSCRASQSVSSNYLAWYQQKPGQPPRLLIYDVSTRATGIPARFSGGGSGTDFTLTISSLEPEDFAVYYCQQRSNWPPWTFGQGTKVEIK

SEQ ID NO: 65 - protein, 250 aa, Artificial Sequence
  source: /note="Description of Artificial Sequence: Synthetic polypeptide"
QVQLVQSGGGVVQPGRSLRLSCAASGFTFSSYGMHWVRQAPGKGLEWVAVISYDGSNKYYADSVKGRFTISRDNSKNTLYLQMNSLRAEDTAVYYCAKGYSRYYYYGMDVWGQGTTVTVSSGGGGSGGGGSGGGGSGGGGSEIVMTQSPATLSLSPGERAILSCRASQSVYTKYLGWYQQKPGQAPRLLIYDASTRATGIPDRFSGSGSGTDFTLTINRLEPEDFAVYYCQHYGGSPLITFGQGTKVDIK

SEQ ID NO: 66 - protein, 249 aa, Artificial Sequence
  source: /note="Description of Artificial Sequence: Synthetic polypeptide"
QVQLVQSGGGLVQPGGSLRLSCAASGFTFSSYAMSWVRQAPGKGLEWVSAISGSGGSTYYADSVKGRFTISRDNSKNTLYLQMNSLRAEDTAVYYCAKREAAAGHDWYFDLWGRGTLVTVSSGGGGSGGGGSGGGGSGGGGSDIRVTQSPSSLSASVGDRVTITCRASQSISSYLNWYQQKPGKAPKLLIYAASSLQSGVPSRFSGSGSGTDFTLTISSLQPEDFATYYCQQSYSIPLTFGQGTKVEIK

SEQ ID NO: 67 - protein, 247 aa, Artificial Sequence
  source: /note="Description of Artificial Sequence: Synthetic polypeptide"
QVQLVQSWAEVKKPGASVKVSCKASGYTFTSYYMHWVRQAPGQGLEWMGIINPSGGSTSYAQKFQGRVTMTRDTSTSTVYMELSNLRSEDTAVYYCARSPRVTTGYFDYWGQGTLVTVSSGGGGSGGGGSGGGGSGGGGSDIQLTQSPSTLSASVGDRVTITCRASQSISSWLAWYQQKPGKAPKLLIYKASSLESGVPSRFSGSGSGTEFTLTISSLQPDDFATYYCQQYSSYPLTFGGGTRLEIK

SEQ ID NO: 68 - protein, 253 aa, Artificial Sequence
  source: /note="Description of Artificial Sequence: Synthetic polypeptide"
QVQLVQSGAEVRRPGASVKISCRASGDTSTRHYIHWLRQAPGQGPEWMGVINPTTGPATGSPAYAQMLQGRVTMTRDTSTRTVYMELRSLRFEDTAVYYCARSVVGRSAPYYFDYWGQGTLVTVSSGGGGSGGGGSGGGGSGGGGSDIQMTQSPSSLSASVGDRVTITCRASQGISDYSAWYQQKPGKAPKLLIYAASTLQSGVPSRFSGSGSGTDFTLTISYLQSEDFATYYCQQYYSYPLTFGGGTKVDIK

SEQ ID NO: 69 - protein, 249 aa, Artificial Sequence
  source: /note="Description of Artificial Sequence: Synthetic polypeptide"
QVQLQQSGAEVKKPGASVKVSCKASGYTFTNYYMHWVRQAPGQGLEWMGIINPSGGYTTYAQKFQGRLTMTRDTSTSTVYMELSSLRSEDTAVYYCARIRSCGGDCYYFDNWGQGTLVTVSSGGGGSGGGGSGGGGSGGGGSDIQLTQSPSTLSASVGDRVTITCRASENVNIWLAWYQQKPGKAPKLLIYKSSSLASGVPSRFSGSGSGAEFTLTISSLQPDDFATYYCQQYQSYPLTFGGGTKVDIK

SEQ ID NO: 70 - protein, 246 aa, Artificial Sequence
  source: /note="Description of Artificial Sequence: Synthetic polypeptide"
QITLKESGPALVKPTQTLTLTCTFSGFSLSTAGVHVGWIRQPPGKALEWLALISWADDKRYRPSLRSRLDITRVTSKDQVVLSMTNMQPEDTATYYCALQGFDGYEANWGPGTLVTVSSGGGGSGGGGSGGGGSGGGGSDIVMTQSPSSLSASAGDRVTITCRASRGISSALAWYQQKPGKPPKLLIYDASSLESGVPSRFSGSGSGTDFTLTIDSLEPEDFATYYCQQSYSTPWTFGQGTKVDIK

SEQ ID NO: 71 - protein, 246 aa, Artificial Sequence
  source: /note="Description of Artificial Sequence: Synthetic polypeptide"
EIQLVQSGAEVKKPGATVKISCKGSGFNIEDYYIHWVQQAPGKGLEWMGRIDPENDETKYGPIFQGRVTITADTSTNTVYMELSSLRSEDTAVYYCAFRGGVYWGQGTTVTVSSGGGGSGGGGSGGGGSGGGGSDVVMTQSPDSLAVSLGERATINCKSSQSLLDSDGKTYLNWLQQKPGQPPKRLISLVSKLDSGVPDRFSGSGSGTDFTLTISSLQAEDVAVYYCWQGTHFPGTFGGGTKVEIK

SEQ ID NO: 72 - protein, 246 aa, Artificial Sequence
  source: /note="Description of Artificial Sequence: Synthetic polypeptide"
DVVMTQSPDSLAVSLGERATINCKSSQSLLDSDGKTYLNWLQQKPGQPPKRLISLVSKLDSGVPDRFSGSGSGTDFTLTISSLQAEDVAVYYCWQGTHFPGTFGGGTKVEIKGGGGSGGGGSGGGGSGGGGSEIQLVQSGAEVKKPGATVKISCKGSGFNIEDYYIHWVQQAPGKGLEWMGRIDPENDETKYGPIFQGRVTITADTSTNTVYMELSSLRSEDTAVYYCAFRGGVYWGQGTTVTVSS

SEQ ID NO: 73 - protein, 246 aa, Artificial Sequence
  source: /note="Description of Artificial Sequence: Synthetic polypeptide"
EIQLVQSGAEVKKPGESLRISCKGSGFNIEDYYIHWVRQMPGKGLEWMGRIDPENDETKYGPIFQGHVTISADTSINTVYLQWSSLKASDTAMYYCAFRGGVYWGQGTTVTVSSGGGGSGGGGSGGGGSGGGGSDVVMTQSPLSLPVTLGQPASISCKSSQSLLDSDGKTYLNWLQQRPGQSPRRLISLVSKLDSGVPDRFSGSGSGTDFTLKISRVEAEDVGVYYCWQGTHFPGTFGGGTKVEIK

SEQ ID NO: 74 - protein, 246 aa, Artificial Sequence
  source: /note="Description of Artificial Sequence: Synthetic polypeptide"
DVVMTQSPLSLPVTLGQPASISCKSSQSLLDSDGKTYLNWLQQRPGQSPRRLISLVSKLDSGVPDRFSGSGSGTDFTLKISRVEAEDVGVYYCWQGTHFPGTFGGGTKVEIKGGGGSGGGGSGGGGSGGGGSEIQLVQSGAEVKKPGESLRISCKGSGFNIEDYYIHWVRQMPGKGLEWMGRIDPENDETKYGPIFQGHVTISADTSINTVYLQWSSLKASDTAMYYCAFRGGVYWGQGTTVTVSS

SEQ ID NO: 75 - protein, 246 aa, Artificial Sequence
  source: /note="Description of Artificial Sequence: Synthetic polypeptide"
EIQLVQSGAEVKKPGATVKISCKGSGFNIEDYYIHWVQQAPGKGLEWMGRIDPENDETKYGPIFQGRVTITADTSTNTVYMELSSLRSEDTAVYYCAFRGGVYWGQGTTVTVSSGGGGSGGGGSGGGGSGGGGSDVVMTQSPLSLPVTLGQPASISCKSSQSLLDSDGKTYLNWLQQRPGQSPRRLISLVSKLDSGVPDRFSGSGSGTDFTLKISRVEAEDVGVYYCWQGTHFPGTFGGGTKVEIK

SEQ ID NO: 76 - protein, 246 aa, Artificial Sequence
  source: /note="Description of Artificial Sequence: Synthetic polypeptide"
EIQLVQSGAEVKKPGESLRISCKGSGFNIEDYYIHWVRQMPGKGLEWMGRIDPENDETKYGPIFQGHVTISADTSINTVYLQWSSLKASDTAMYYCAFRGGVYWGQGTTVTVSSGGGGSGGGGSGGGGSGGGGSDVVMTQSPDSLAVSLGERATINCKSSQSLLDSDGKTYLNWLQQKPGQPPKRLISLVSKLDSGVPDRFSGSGSGTDFTLTISSLQAEDVAVYYCWQGTHFPGTFGGGTKVEIK

SEQ ID NO: 77 - protein, 246 aa, Artificial Sequence
  source: /note="Description of Artificial Sequence: Synthetic polypeptide"
DVVMTQSPDSLAVSLGERATINCKSSQSLLDSDGKTYLNWLQQKPGQPPKRLISLVSKLDSGVPDRFSGSGSGTDFTLTISSLQAEDVAVYYCWQGTHFPGTFGGGTKVEIKGGGGSGGGGSGGGGSGGGGSEIQLVQSGAEVKKPGESLRISCKGSGFNIEDYYIHWVRQMPGKGLEWMGRIDPENDETKYGPIFQGHVTISADTSINTVYLQWSSLKASDTAMYYCAFRGGVYWGQGTTVTVSS

SEQ ID NO: 78 - protein, 246 aa, Artificial Sequence
  source: /note="Description of Artificial Sequence: Synthetic polypeptide"
DVVMTQSPLSLPVTLGQPASISCKSSQSLLDSDGKTYLNWLQQRPGQSPRRLISLVSKLDSGVPDRFSGSGSGTDFTLKISRVEAEDVGVYYCWQGTHFPGTFGGGTKVEIKGGGGSGGGGSGGGGSGGGGSEIQLVQSGAEVKKPGATVKISCKGSGFNIEDYYIHWVQQAPGKGLEWMGRIDPENDETKYGPIFQGRVTITADTSTNTVYMELSSLRSEDTAVYYCAFRGGVYWGQGTTVTVSS

SEQ ID NO: 79 - protein, 243 aa, Artificial Sequence
  source: /note="Description of Artificial Sequence: Synthetic polypeptide"
EIQLQQSGAELVKPGASVKLSCTGSGFNIEDYYIHWVKQRTEQGLEWIGRIDPENDETKYGPIFQGRATITADTSSNTVYLQLSSLTSEDTAVYYCAFRGGVYWGPGTTLTVSSGGGGSGGGGSGGGGSHMDVVMTQSPLTLSVAIGQSASISCKSSQSLLDSDGKTYLNWLLQRPGQSPKRLISLVSKLDSGVPDRFTGSGSGTDFTLRISRVEAEDLGIYYCWQGTHFPGTFGGGTKLEIK

SEQ ID NO: 80 - protein, 30 aa, Artificial Sequence
  source: /note="Description of Artificial Sequence: Synthetic polypeptide"
  MISC_FEATURE (1)..(30): /note="This sequence may encompass 1-6 'Gly Gly Gly Gly Ser' repeating units"
  source: /note="See specification as filed for detailed description of substitutions and preferred embodiments"
GGGGSGGGGSGGGGSGGGGSGGGGSGGGGS

SEQ ID NO: 81 - protein, 18 aa, Artificial Sequence
  source: /note="Description of Artificial Sequence: Synthetic peptide"
GSTSGSGKPGSGEGSTKG

SEQ ID NO: 82 - DNA, 5000 bp, Artificial Sequence; identical to SEQ ID NO: 34
  source: /note="Description of Artificial Sequence: Synthetic polynucleotide"
  misc_feature (1)..(5000): /note="This sequence may encompass 100-5000 nucleotides"
  source: /note="See specification as filed for detailed description of substitutions and preferred embodiments"

SEQ ID NO: 83 - protein, 242 aa, Artificial Sequence
  source: /note="Description of Artificial Sequence: Synthetic polypeptide"
EIVMTQSPATLSLSPGERATLSCRASQDISKYLNWYQQKPGQAPRLLIYHTSRLHSGIPARFSGSGSGTDYTLTISSLQPEDFAVYFCQQGNTLPYTFGQGTKLEIKGGGGSGGGGSGGGGSQVQLQESGPGLVKPSETLSLTCTVSGVSLPDYGVSWIRQPPGKGLEWIGVIWGSETTYYSSSLKSRVTISKDNSKNQVSLKLSSVTAADTAVYYCAKHYYYGGSYAMDYWGQGTLVTVSS

SEQ ID NO: 84 - protein, 242 aa, Artificial Sequence
  source: /note="Description of Artificial Sequence: Synthetic polypeptide"
EIVMTQSPATLSLSPGERATLSCRASQDISKYLNWYQQKPGQAPRLLIYHTSRLHSGIPARFSGSGSGTDYTLTISSLQPEDFAVYFCQQGNTLPYTFGQGTKLEIKGGGGSGGGGSGGGGSQVQLQESGPGLVKPSETLSLTCTVSGVSLPDYGVSWIRQPPGKGLEWIGVIWGSETTYYQSSLKSRVTISKDNSKNQVSLKLSSVTAADTAVYYCAKHYYYGGSYAMDYWGQGTLVTVSS

SEQ ID NO: 85 - protein, 242 aa, Artificial Sequence
  source: /note="Description of Artificial Sequence: Synthetic polypeptide"
QVQLQESGPGLVKPSETLSLTCTVSGVSLPDYGVSWIRQPPGKGLEWIGVIWGSETTYYSSSLKSRVTISKDNSKNQVSLKLSSVTAADTAVYYCAKHYYYGGSYAMDYWGQGTLVTVSSGGGGSGGGGSGGGGSEIVMTQSPATLSLSPGERATLSCRASQDISKYLNWYQQKPGQAPRLLIYHTSRLHSGIPARFSGSGSGTDYTLTISSLQPEDFAVYFCQQGNTLPYTFGQGTKLEIK

SEQ ID NO: 86 - protein, 242 aa, Artificial Sequence
  source: /note="Description of Artificial Sequence: Synthetic polypeptide"
QVQLQESGPGLVKPSETLSLTCTVSGVSLPDYGVSWIRQPPGKGLEWIGVIWGSETTYYQSSLKSRVTISKDNSKNQVSLKLSSVTAADTAVYYCAKHYYYGGSYAMDYWGQGTLVTVSSGGGGSGGGGSGGGGSEIVMTQSPATLSLSPGERATLSCRASQDISKYLNWYQQKPGQAPRLLIYHTSRLHSGIPARFSGSGSGTDYTLTISSLQPEDFAVYFCQQGNTLPYTFGQGTKLEIK

SEQ ID NO: 87 - protein, 247 aa, Artificial Sequence
  source: /note="Description of Artificial Sequence: Synthetic polypeptide"
EIVMTQSPATLSLSPGERATLSCRASQDISKYLNWYQQKPGQAPRLLIYHTSRLHSGIPARFSGSGSGTDYTLTISSLQPEDFAVYFCQQGNTLPYTFGQGTKLEIKGGGGSGGGGSGGGGSGGGGSQVQLQESGPGLVKPSETLSLTCTVSGVSLPDYGVSWIRQPPGKGLEWIGVIWGSETTYYSSSLKSRVTISKDNSKNQVSLKLSSVTAADTAVYYCAKHYYYGGSYAMDYWGQGTLVTVSS

SEQ ID NO: 88 - protein, 247 aa, Artificial Sequence
  source: /note="Description of Artificial Sequence: Synthetic polypeptide"
EIVMTQSPATLSLSPGERATLSCRASQDISKYLNWYQQKPGQAPRLLIYHTSRLHSGIPARFSGSGSGTDYTLTISSLQPEDFAVYFCQQGNTLPYTFGQGTKLEIKGGGGSGGGGSGGGGSGGGGSQVQLQESGPGLVKPSETLSLTCTVSGVSLPDYGVSWIRQPPGKGLEWIGVIWGSETTYYQSSLKSRVTISKDNSKNQVSLKLSSVTAADTAVYYCAKHYYYGGSYAMDYWGQGTLVTVSS

SEQ ID NO: 89 - protein, 247 aa, Artificial Sequence
  source: /note="Description of Artificial Sequence: Synthetic polypeptide"
QVQLQESGPGLVKPSETLSLTCTVSGVSLPDYGVSWIRQPPGKGLEWIGVIWGSETTYYSSSLKSRVTISKDNSKNQVSLKLSSVTAADTAVYYCAKHYYYGGSYAMDYWGQGTLVTVSSGGGGSGGGGSGGGGSGGGGSEIVMTQSPATLSLSPGERATLSCRASQDISKYLNWYQQKPGQAPRLLIYHTSRLHSGIPARFSGSGSGTDYTLTISSLQPEDFAVYFCQQGNTLPYTFGQGTKLEIK

SEQ ID NO: 90 - protein, 247 aa, Artificial Sequence
  source: /note="Description of Artificial Sequence: Synthetic polypeptide"
QVQLQESGPGLVKPSETLSLTCTVSGVSLPDYGVSWIRQPPGKGLEWIGVIWGSETTYYQSSLKSRVTISKDNSKNQVSLKLSSVTAADTAVYYCAKHYYYGGSYAMDYWGQGTLVTVSSGGGGSGGGGSGGGGSGGGGSEIVMTQSPATLSLSPGERATLSCRASQDISKYLNWYQQKPGQAPRLLIYHTSRLHSGIPARFSGSGSGTDYTLTISSLQPEDFAVYFCQQGNTLPYTFGQGTKLEIK

SEQ ID NO: 91 - protein, 247 aa, Artificial Sequence
  source: /note="Description of Artificial Sequence: Synthetic polypeptide"
EIVMTQSPATLSLSPGERATLSCRASQDISKYLNWYQQKPGQAPRLLIYHTSRLHSGIPARFSGSGSGTDYTLTISSLQPEDFAVYFCQQGNTLPYTFGQGTKLEIKGGGGSGGGGSGGGGSGGGGSQVQLQESGPGLVKPSETLSLTCTVSGVSLPDYGVSWIRQPPGKGLEWIGVIWGSETTYYNSSLKSRVTISKDNSKNQVSLKLSSVTAADTAVYYCAKHYYYGGSYAMDYWGQGTLVTVSS

SEQ ID NO: 92 - protein, 247 aa, Artificial Sequence
  source: /note="Description of Artificial Sequence: Synthetic polypeptide"
QVQLQESGPGLVKPSETLSLTCTVSGVSLPDYGVSWIRQPPGKGLEWIGVIWGSETTYYNSSLKSRVTISKDNSKNQVSLKLSSVTAADTAVYYCAKHYYYGGSYAMDYWGQGTLVTVSSGGGGSGGGGSGGGGSGGGGSEIVMTQSPATLSLSPGERATLSCRASQDISKYLNWYQQKPGQAPRLLIYHTSRLHSGIPARFSGSGSGTDYTLTISSLQPEDFAVYFCQQGNTLPYTFGQGTKLEIK

SEQ ID NO: 93 - protein, 242 aa, Artificial Sequence
  source: /note="Description of Artificial Sequence: Synthetic polypeptide"
EIVMTQSPATLSLSPGERATLSCRASQDISKYLNWYQQKPGQAPRLLIYHTSRLHSGIPARFSGSGSGTDYTLTISSLQPEDFAVYFCQQGNTLPYTFGQGTKLEIKGGGGSGGGGSGGGGSQVQLQESGPGLVKPSETLSLTCTVSGVSLPDYGVSWIRQPPGKGLEWIGVIWGSETTYYNSSLKSRVTISKDNSKNQVSLKLSSVTAADTAVYYCAKHYYYGGSYAMDYWGQGTLVTVSS

SEQ ID NO: 94 - protein, 242 aa, Artificial Sequence
  source: /note="Description of Artificial Sequence: Synthetic polypeptide"
QVQLQESGPGLVKPSETLSLTCTVSGVSLPDYGVSWIRQPPGKGLEWIGVIWGSETTYYNSSLKSRVTISKDNSKNQVSLKLSSVTAADTAVYYCAKHYYYGGSYAMDYWGQGTLVTVSSGGGGSGGGGSGGGGSEIVMTQSPATLSLSPGERATLSCRASQDISKYLNWYQQKPGQAPRLLIYHTSRLHSGIPARFSGSGSGTDYTLTISSLQPEDFAVYFCQQGNTLPYTFGQGTKLEIK

SEQ ID NO: 95 - protein, 242 aa, Artificial Sequence
  source: /note="Description of Artificial Sequence: Synthetic polypeptide"
DIQMTQTTSSLSASLGDRVTISCRASQDISKYLNWYQQKPDGTVKLLIYHTSRLHSGVPSRFSGSGSGTDYSLTISNLEQEDIATYFCQQGNTLPYTFGGGTKLEITGGGGSGGGGSGGGGSEVKLQESGPGLVAPSQSLSVTCTVSGVSLPDYGVSWIRQPPRKGLEWLGVIWGSETTYYNSALKSRLTIIKDNSKSQVFLKMNSLQTDDTAIYYCAKHYYYGGSYAMDYWGQGTSVTVSS

SEQ ID NO: 96 - protein, 119 aa, Artificial Sequence
  source: /note="Description of Artificial Sequence: Synthetic polypeptide"
QVQLLESGAELVRPGSSVKISCKASGYAFSSYWMNWVKQRPGQGLEWIGQIYPGDGDTNYNGKFKGQATLTADKSSSTAYMQLSGLTSEDSAVYSCARKTISSVVDFYFDYWGQGTTVT

SEQ ID NO: 97 - protein, 111 aa, Artificial Sequence
  source: /note="Description of Artificial Sequence: Synthetic polypeptide"
ELVLTQSPKFMSTSVGDRVSVTCKASQNVGTNVAWYQQKPGQSPKPLIYSATYRNSGVPDRFTGSGSGTDFTLTITNVQSKDLADYFYFCQYNRYPYTSGGGTKLEIKRRS

SEQ ID NO: 98 - protein, 244 aa, Artificial Sequence
  source: /note="Description of Artificial Sequence: Synthetic polypeptide"
EVQLQQSGPELVKPGASMKISCKASGYSFTGYTMNWVKQSHGKNLEWIGLINPYNGGTIYNQKFKGKATLTVDKSSSTAYMELLSLTSEDSAVYYCARDYGFVLDYWGQGTTLTVSSGGGGSGGGGSGGGGSGGGGSQIVLTQSPSIMSVSPGEKVTITCSASSSVSYMHWFQQKPGTSPKLCIYSTSNLASGVPARFSGRGSGTSYSLTISRVAAEDAATYYCQQRSNYPPWTFGGGTKLEIK

SEQ ID NO: 99 - protein, 244 aa, Artificial Sequence
  source: /note="Description of Artificial Sequence: Synthetic polypeptide"
EVQLQQSGPELVKPGASMKISCKASGYSFTGYTMNWVKQSHGKNLEWIGLINPYNGGTIYNQKFKGKATLTVDKSSSTAYMELLSLTSEDSAVYYCARDYGFVLDYWGQGTTLTVSSGGGGSGGGGSGGGGSGGGGSQIVLTQSPAIMSASPGEKVTITCSASSSVSYLHWFQQKPGTSPKLWVYSTSNLPSGVPARFGGSGSGTSYSLTISRMEAEDAATYYCQQRSIYPPWTFGGGTKLEIK

SEQ ID NO: 100 - protein, 244 aa, Artificial Sequence
  source: /note="Description of Artificial Sequence: Synthetic polypeptide"
EVQLQQSGPELVKPGASMKISCKASGYSFTGYTMNWVKQSHGKNLEWIGLINPYNGGTIYNQKFKGKATLTVDKSSSTAYMELLSLTSEDSAVYYCARDYGFVLDYWGQGTTLTVSSGGGGSGGGGSGGGGSGGGGSQIVLTQSPSIMSVSPGEKVTITCSASSSVSYMHWFQQKPGTSPKLGIYSTSNLASGVPARFSGRGSGTSYSLTISRVAAEDAATYYCQQRSNYPPWTFGGGTKLEIK

SEQ ID NO: 101 - DNA, 521 bp, Unknown
  source: /note="Description of Unknown: wild-type PGK promoter sequence"
acccctctctccagccactaagccagttgctccctcggctgacggctgcacgcgaggcctccgaacgtcttacgccttgtggcgcgcccgtccttgtcccgggtgtgatggcggggtgtggggcggagggcgtggcggggaagggccggcgacgagagccgcgcgggacgactcgtcggcgataaccggtgtcgggtagcgccagccgcgcgacggtaacgagggaccgcgacaggcagacgctcccatgatcactctgcacgccgaaggcaaatagtgcaggccgtgcggcgcttggcgttccttggaagggctgaatccccgcctcgtccttcgcagcggccccccgggtgttcccatcgccgcttctaggcccactgcgacgcttgcctgcacttcttacacgctctgggtcccagccgcggcgacgcaaagggccttggtgcgggtctcgtcggcgcagggacgcgtttgggtcccgacggaaccttttccgcgttggggttggggcaccataagct

SEQ ID NO: 102 - DNA, 118 bp, Artificial Sequence
  source: /note="Description of Artificial Sequence: Synthetic polynucleotide"
acccctctctccagccactaagccagttgctccctcggctgacggctgcacgcgaggcctccgaacgtcttacgccttgtggcgcgcccgtccttgtcccgggtgtgatggcggggtg

SEQ ID NO: 103 - DNA, 221 bp, Artificial Sequence
  source: /note="Description of Artificial Sequence: Synthetic polynucleotide"
acccctctctccagccactaagccagttgctccctcggctgacggctgcacgcgaggcctccgaacgtcttacgccttgtggcgcgcccgtccttgtcccgggtgtgatggcggggtgtggggcggagggcgtggcggggaagggccggcgacgagagccgcgcgggacgactcgtcggcgataaccggtgtcgggtagcgccagccgcgcgacggtaacg

SEQ ID NO: 104 - DNA, 324 bp, Artificial Sequence
  source: /note="Description of Artificial Sequence: Synthetic polynucleotide"
acccctctctccagccactaagccagttgctccctcggctgacggctgcacgcgaggcctccgaacgtcttacgccttgtggcgcgcccgtccttgtcccgggtgtgatggcggggtgtggggcggagggcgtggcggggaagggccggcgacgagagccgcgcgggacgactcgtcggcgataaccggtgtcgggtagcgccagccgcgcgacggtaacgagggaccgcgacaggcagacgctcccatgatcactctgcacgccgaaggcaaatagtgcaggccgtgcggcgcttggcgttccttggaagggctgaatccccg

SEQ ID NO: 105 - DNA, 422 bp, Artificial Sequence
  source: /note="Description of Artificial Sequence: Synthetic polynucleotide"
acccctctctccagccactaagccagttgctccctcggctgacggctgcacgcgaggcctccgaacgtcttacgccttgtggcgcgcccgtccttgtcccgggtgtgatggcggggtgtggggcggagggcgtggcggggaagggccggcgacgagagccgcgcgggacgactcgtcggcgataaccggtgtcgggtagcgccagccgcgcgacggtaacgagggaccgcgacaggcagacgctcccatgatcactctgcacgccgaaggcaaatagtgcaggccgtgcggcgcttggcgttccttggaagggctgaatccccgcctcgtccttcgcagcggccccccgggtgttcccatcgccgcttctaggcccactgcgacgcttgcctgcacttcttacacgctctgggtcccagccg

SEQ ID NO: 106 - protein, 21 aa, Artificial Sequence
  source: /note="Description of Artificial Sequence: Synthetic peptide"
  VARIANT (1)..(3): /replace=" "
  misc_feature (1)..(21): /note="Variant residues given in the sequence have no preference with respect to those in the annotations for variant positions"
GSGEGRGSLLTCGDVEENPGP

SEQ ID NO: 107 - protein, 22 aa, Artificial Sequence
  source: /note="Description of Artificial Sequence: Synthetic peptide"
  VARIANT (1)..(3): /replace=" "
  misc_feature (1)..(22): /note="Variant residues given in the sequence have no preference with respect to those in the annotations for variant positions"
GSGATNFSLLKQAGDVEENPGP

SEQ ID NO: 108 - protein, 23 aa, Artificial Sequence
  source: /note="Description of Artificial Sequence: Synthetic peptide"
  VARIANT (1)..(3): /replace=" "
  misc_feature (1)..(23): /note="Variant residues given in the sequence have no preference with respect to those in the annotations for variant positions"
GSGQCTNYALLKLAGDVESNPGP

SEQ ID NO: 109 - protein, 25 aa, Artificial Sequence
  source: /note="Description of Artificial Sequence: Synthetic peptide"
  VARIANT (1)..(3): /replace=" "
  misc_feature (1)..(25): /note="Variant residues given in the sequence have no preference with respect to those in the annotations for variant positions"
GSGVKQTLNFDLLKLAGDVESNPGP

SEQ ID NO: 110 - protein, 1132 aa, Homo sapiens [sequence omitted]

SEQ ID NO: 111 - DNA, 4027 bp, Homo sapiens
caggcagcgtggtcctgctgcgcacgtgggaagccctggccccggccacccccgcgatgccgcgcgctccccgctgccgagccgtgcgctccctgctgcgcagccactaccgcgaggtgctgccgctggccacgttcgtgcggcgcctggggccccagggctggcggctggtgcagcgcggggacccggcggctttccgcgcgctggtggcccagtgcctggtgtgcgtgccctgggacgcacggccgccccccgccgccccctccttccgccaggtgtcctgcctgaaggagctggtggcccgagtgctgcagaggctgtgcgagcgcggcgcgaagaacgtgctggccttcggcttcgcgctgctggacggggcccgcgggggcccccccgaggccttcaccaccagcgtgcgcagctacctgcccaacacggtgaccgacgcactgcgggggagcggggcgtgggggctgctgttgcgccgcgtgggcgacgacgtgctggttcacctgctggcacgctgcgcgctctttgtgctggtggctcccagctgcgcctaccaggtgtgcgggccgccgctgtaccagctcggcgctgccactcaggcccggcccccgccacacgctagtggaccccgaaggcgtctgggatgcgaacgggcctggaaccatagcgtcagggaggccggggtccccctgggcctgccagccccgggtgcgaggaggcgcgggggcagtgccagccgaagtctgccgttgcccaagaggcccaggcgtggcgctgcccctgagccggagcggacgcccgttgggcaggggtcctgggcccacccgggcaggacgcgtggaccgagtgaccgtggtttctgtgtggtgtcacctgccagacccgccgaagaagccacctctttggagggtgcgctctctggcacgcgccactcccacccatccgtgggccgccagcaccacgcgggccccccatccacatcgcggccaccacgtccctgggacacgccttgtcccccggtgtacgccgagaccaagcacttcctctactcctcaggcgacaaggagcagctgcggccctccttcctactcagctctctgaggcccagcctgactggcgctcggaggctcgtggagaccatctttctgggttccaggccctggatgccagggactccccgcaggttgccccgcctgccccagcgctactggcaaatgcggcccctgtttctggagctgcttgggaaccacgcgcagtgcccctacggggtgctcctcaagacgcactgcccgctgcgagctgcggtcaccccagcagccggtgtctgtgcccgggagaagccccagggctctgtggcggcccccgaggaggaggacacagacccccgtcgcctggtgcagctgctccgccagcacagcagcccctggcaggtgtacggcttcgtgcgggcctgcctgcgccggctggtgcccccaggcctctggggctccaggcacaacgaacgccgcttcctcaggaacaccaagaagttcatctccctggggaagcatgccaagctctcgctgcaggagctgacgtggaagatgagcgtgcggggctgcgcttggctgcgcaggagcccaggggttggctgtgttccggccgcagagcaccgtctgcgtgaggagatcctggccaagttcctgcactggctgatgagtgtgtacgtcgtcgagctgctcaggtctttcttttatgtcacggagaccacgtttcaaaagaacaggctctttttctaccggaagagtgtctggagcaagttgcaaagcattggaatcagacagcacttgaagagggtgcagctgcgggagctgtcggaagcagaggtcaggcagcatcgggaagccaggcccgccctgctgacgtccagactccgcttcatccccaagcctgacgggctgcggccgattgtgaacatggactacgtcgtgggagccagaacgttccgcagagaaaagagggccgagcgtctcacctcgagggtgaaggcactgttcagcgtgctcaactacgagcgggcgcggcgccccggcctcctgggcgcctctgtgctgggcctggacgatatccacagggcctggcgcaccttcgtgctgcgtgtgcgggcccaggacccgccgcctgagctgtactttgtcaaggtggatgtgacgggcgcgtacgacaccatcccccaggacaggctcacggaggtcatcgccagcatcatcaaaccccagaacacgtactgcgtgcgtcggtatgccgtggtccagaaggccgcccatgggcacgtccgcaaggccttcaagagccacgtctctaccttgacagacctccagccgtacatgcgacagttcgtggctcacctgcaggagaccagcccgctgagggatgccgtcgtcatcgagcagagctcctccctgaatgaggccagcagtggcctcttcgacgtcttcctacgcttcatgtgccaccacgccgtgcgcatcaggggcaagtcctacgtccagtgccaggggatcccgcagggctccatcctctccacgctgctctgcagcctgtgctacggcgacatggagaacaagctgtttgcggggattcggcgggacgggctgctcctgcgtttggtggatgatttcttgttggtgacacctcacctcacccacgcgaaaaccttcctcaggaccctggtccgaggtgtccctgagtatggctgcgtggtgaacttgcggaagacagtggtgaacttccctgtagaagacgaggccctgggtggcacggcttttgttcagatgccggcccacggcctattcccctggtgcggcctgctgctggatacccggaccctggaggtgcagagcgactactccagctatgcccggacctccatcagagccagtctcaccttcaaccgcggcttcaaggctgggaggaacatgcgtcgcaaactctttggggtcttgcggctgaagtgtcacagcctgtttctggatttgcaggtgaacagcctccagacggtgtgcaccaacatctacaagatcctcctgctgcaggcgtacaggtttcacgcatgtgtgctgcagctcccatttcatcagcaagtttggaagaaccccacatttttcctgcgcgtcatctctgacacggcctccctctgctactccatcctgaaagccaagaacgcagggatgtcgctgggggccaagggcgccgccggccctctgccctccgaggccgtgcagtggctgtgccaccaagcattcctgctcaagctgactcgacaccgtgtcacctacgtgccactcctggggtcactcaggacagcccagacgcagctgagtcggaagctcccggggacgacgctgactgccctggaggccgcagccaacccggcactgccctcagacttcaagaccatcctggactgatggccacccgcccacagccaggccgagagcagacaccagcagccctgtcacgccgggctctacgtcccagggagggaggggcggcccacacccaggcccgcaccgctgggagtctgaggcctgagtgagtgtttggccgaggcctgcatgtccggctgaaggctgagtgtccggctgaggcctgagcgagtgtccagccaagggctgagtgtccagcacacctgccgtcttcacttccccacaggctggcgctcggctccaccccagggccagcttttcctcaccaggagcccggcttccactccccacataggaatagtccatccccagattcgccattgttcacccctcgccctgccctcctttgccttccacccccaccatccaggtggagaccctgagaaggaccctgggagctctgggaatttggagtgaccaaaggtgtgccctgtacacaggcgaggaccctgcacctggatgggggtccctgtgggtcaaattggggggaggtgctgtgggagtaaaatactgaatatatgagtttttcagttttgaaaaaaaaaaaaaaaaaa

SEQ ID NO: 112 - protein, 248 aa, Artificial Sequence
  source: /note="Description of Artificial Sequence: Synthetic polypeptide"
QVQLLESGAELVRPGSSVKISCKASGYAFSSYWMNWVKQRPGQGLEWIGQIYPGDGDTNYNGKFKGQATLTADKSSSTAYMQLSGLTSEDSAVYSCARKTISSVVDFYFDYWGQGTTVTGSTSGSGKPGSGEGSTKGELVLTQSPKFMSTSVGDRVSVTCKASQNVGTNVAWYQQKPGQSPKPLIYSATYRNSGVPDRFTGSGSGTDFTLTITNVQSKDLADYFYFCQYNRYPYTSGGGTKLEIKRRS

SEQ ID NO: 113 - protein, 10 aa, Artificial Sequence
  source: /note="Description of Artificial Sequence: Synthetic peptide"
GYTFTGYYMH

SEQ ID NO: 114 - protein, 10 aa, Artificial Sequence
  source: /note="Description of Artificial Sequence: Synthetic peptide"
GFTFSSYWMH

SEQ ID NO: 115 - protein, 10 aa, Artificial Sequence
  source: /note="Description of Artificial Sequence: Synthetic peptide"
GYTFTDYYMH

SEQ ID NO: 116 - protein, 10 aa, Artificial Sequence
  source: /note="Description of Artificial Sequence: Synthetic peptide"
GYTFTSYYMH

SEQ ID NO: 117 - protein, 10 aa, Artificial Sequence
  source: /note="Description of Artificial Sequence: Synthetic peptide"
GFTFSSYAMH

SEQ ID NO: 118 - protein, 10 aa, Artificial Sequence
  source: /note="Description of Artificial Sequence: Synthetic peptide"
GYPFTGYSLH

SEQ ID NO: 119 - protein, 10 aa, Artificial Sequence
  source: /note="Description of Artificial Sequence: Synthetic peptide"
GYTFTSYYMH

SEQ ID NO: 120 - protein, 10 aa, Artificial Sequence
  source: /note="Description of Artificial Sequence: Synthetic peptide"
GYTFTSYGIS

SEQ ID NO: 121 - protein, 10 aa, Artificial Sequence
  source: /note="Description of Artificial Sequence: Synthetic peptide"
GYTFTGYYMH

SEQ ID NO: 122 - protein, 10 aa, Artificial Sequence
  source: /note="Description of Artificial Sequence: Synthetic peptide"
GFIFSDYYMG

SEQ ID NO: 123 - protein, 10 aa, Artificial Sequence
  source: /note="Description of Artificial Sequence: Synthetic peptide"
GFTFRGYYIH

SEQ ID NO: 124 - protein, 10 aa, Artificial Sequence
  source: /note="Description of Artificial Sequence: Synthetic peptide"
GFTFDDYAMH

SEQ ID NO: 125 - protein, 10 aa, Artificial Sequence
  source: /note="Description of Artificial Sequence: Synthetic peptide"
GFTFSSYWMH

SEQ ID NO: 126 - protein, 10 aa, Artificial Sequence
  source: /note="Description of Artificial Sequence: Synthetic peptide"
GFTFSSYGMH

SEQ ID NO: 127 - protein, 10 aa, Artificial Sequence
  source: /note="Description of Artificial Sequence: Synthetic peptide"
GFTFSSYAMS

SEQ ID NO: 128 - protein, 10 aa, Artificial Sequence
  source: /note="Description of Artificial Sequence: Synthetic peptide"
GYTFTSYYMH

SEQ ID NO: 129 - protein, 10 aa, Artificial Sequence
  source: /note="Description of Artificial Sequence: Synthetic peptide"
GDTSTRHYIH

SEQ ID NO: 130 - protein, 10 aa, Artificial Sequence
  source: /note="Description of Artificial Sequence: Synthetic peptide"
GYTFTNYYMH

SEQ ID NO: 131 - protein, 12 aa, Artificial Sequence
  source: /note="Description of Artificial Sequence: Synthetic peptide"
GFSLSTAGVHVG

SEQ ID NO: 132 - protein, 10 aa, Artificial Sequence
  source: /note="Description of Artificial Sequence: Synthetic peptide"
GYSFTGYTMN

SEQ ID NO: 133 - protein, 17 aa, Artificial Sequence
  source: /note="Description of Artificial Sequence: Synthetic peptide"
RINPNSGGTNYAQKFQG

SEQ ID NO: 134 - protein, 17 aa, Artificial Sequence
  source: /note="Description of Artificial Sequence: Synthetic peptide"
WINPNSGGTNYAQKFQG

SEQ ID NO: 135 - protein, 17 aa, Artificial Sequence
  source: /note="Description of Artificial Sequence: Synthetic peptide"
RINTDGSTTTYADSVEG

SEQ ID NO: 136 - protein, 16 aa, Artificial Sequence
  source: /note="Description of Artificial Sequence: Synthetic peptide"
IINPSGGSTSYAQKFQ

SEQ ID NO: 137 - protein, 17 aa, Artificial Sequence
  source: /note="Description of Artificial Sequence: Synthetic peptide"
VISYDGSNKYYADSVKG

SEQ ID NO: 138 - protein, 17 aa, Artificial Sequence
  source: /note="Description of Artificial Sequence: Synthetic peptide"
WINPNSGGTNYAQKFQG

SEQ ID NO: 139 - protein, 17 aa, Artificial Sequence
  source: /note="Description of Artificial Sequence: Synthetic peptide"
IINPSGGSTGYAQKFQG

SEQ ID NO: 140 - protein, 16 aa, Artificial Sequence
  source: /note="Description of Artificial Sequence: Synthetic peptide"
WISAYNGNTNYAQKLQ

SEQ ID NO: 141 - protein, 17 aa, Artificial Sequence
  source: /note="Description of Artificial Sequence: Synthetic peptide"
WINPNSGGTNYAQNFQG

SEQ ID NO: 142 - protein, 17 aa, Artificial Sequence
  source: /note="Description of Artificial Sequence: Synthetic peptide"
RINPNSGGTNYAQKFQG

SEQ ID NO: 143 - protein, 17 aa, Artificial Sequence
  source: /note="Description of Artificial Sequence: Synthetic peptide"
YIGRSGSSMYYADSVKG

SEQ ID NO: 144 - protein, 17 aa, Artificial Sequence
  source: /note="Description of Artificial Sequence: Synthetic peptide"
IINPSGGSRAYAQKFQG

SEQ ID NO: 145 - protein, 16 aa, Artificial Sequence
  source: /note="Description of Artificial Sequence: Synthetic peptide"
GISWNSGSIGYADSVK

SEQ ID NO: 146 - protein, 17 aa, Artificial Sequence
  source: /note="Description of Artificial Sequence: Synthetic peptide"
GISWNSGSTGYADSVKG

SEQ ID NO: 147 - protein, 17 aa, Artificial Sequence
  source: /note="Description of Artificial Sequence: Synthetic peptide"
RINSDGSSTSYADSVKG

SEQ ID NO: 148 - protein, 17 aa, Artificial Sequence
  source: /note="Description of Artificial Sequence: Synthetic peptide"
VISYDGSNKYYADSVKG

SEQ ID NO: 149 - protein, 17 aa, Artificial Sequence
  source: /note="Description of Artificial Sequence: Synthetic peptide"
AISGSGGSTYYADSVKG

SEQ ID NO: 150 - protein, 17 aa, Artificial Sequence
  source: /note="Description of Artificial Sequence: Synthetic peptide"
IINPSGGSTSYAQKFQG

SEQ ID NO: 151 - protein, 21 aa, Artificial Sequence
  source: /note="Description of Artificial Sequence: Synthetic peptide"
VINPTTGPATGSPAYAQMLQG

SEQ ID NO: 152 - protein, 17 aa, Artificial Sequence
  source: /note="Description of Artificial Sequence: Synthetic peptide"
IINPSGGYTTYAQKFQG

SEQ ID NO: 153 - protein, 16 aa, Artificial Sequence
  source: /note="Description of Artificial Sequence: Synthetic peptide"
LISWADDKRYRPSLRS

SEQ ID NO: 154 - protein, 17 aa, Artificial Sequence
  source: /note="Description of Artificial Sequence: Synthetic peptide"
LITPYNGASSYNQKFRG

SEQ ID NO: 155 - protein, 8 aa, Artificial Sequence
  source: /note="Description of Artificial Sequence: Synthetic peptide"
GRYYGMDV

SEQ ID NO: 156 - protein, 17 aa, Artificial Sequence
  source: /note="Description of Artificial Sequence: Synthetic peptide"
DLRRTVVTPRAYYGMDV

SEQ ID NO: 157 - protein, 11 aa, Artificial Sequence
  source: /note="Description of Artificial Sequence: Synthetic peptide"
GEWDGSYYYDY

SEQ ID NO: 158 - protein, 5 aa, Artificial Sequence
  source: /note="Description of Artificial Sequence: Synthetic peptide"
GHWAV

SEQ ID NO: 159 - protein, 6 aa, Artificial Sequence
  source: /note="Description of Artificial Sequence: Synthetic peptide"
GWDFDY

SEQ ID NO: 160 - protein, 17 aa, Artificial Sequence
  source: /note="Description of Artificial Sequence: Synthetic peptide"
YRLIAVAGDYYYYGMDV

SEQ ID NO: 161 - protein, 12 aa, Artificial Sequence
  source: /note="Description of Artificial Sequence: Synthetic peptide"
WKVSSSSPAFDY

SEQ ID NO: 162 - protein, 10 aa, Artificial Sequence
  source: /note="Description of Artificial Sequence: Synthetic peptide"
DHYGGNSLFY

SEQ ID NO: 163 - protein, 12 aa, Artificial Sequence
  source: /note="Description of Artificial Sequence: Synthetic peptide"
GGYSSSSDAFDI

SEQ ID NO: 164 - protein, 13 aa, Artificial Sequence
  source: /note="Description of Artificial Sequence: Synthetic peptide"
VAGGIYYYYGMDV

SEQ ID NO: 165 - protein, 6 aa, Artificial Sequence
  source: /note="Description of Artificial Sequence: Synthetic peptide"
GWDFDY

SEQ ID NO: 166 - protein, 9 aa, Artificial Sequence
  source: /note="Description of Artificial Sequence: Synthetic peptide"
TTTSYAFDI

SEQ ID NO: 167 - protein, 12 aa, Artificial Sequence
  source: /note="Description of Artificial Sequence: Synthetic peptide"
SPVVAATEDFQH

SEQ ID NO: 168 - protein, 13 aa, Artificial Sequence
  source: /note="Description of Artificial Sequence: Synthetic peptide"
TASCGGDCYYLDY

SEQ ID NO: 169 - protein, 13 aa, Artificial Sequence
  source: /note="Description of Artificial Sequence: Synthetic peptide"
DGSSSWSWGYFDY

SEQ ID NO: 170 - protein, 14 aa, Artificial Sequence
  source: /note="Description of Artificial Sequence: Synthetic peptide"
DSSSWYGGGSAFDI

SEQ ID NO: 171 - protein, 14 aa, Artificial Sequence
  source: /note="Description of Artificial Sequence: Synthetic peptide"
DSSSWYGGGSAFDI

SEQ ID NO: 172 - protein, 13 aa, Artificial Sequence
  source: /note="Description of Artificial Sequence: Synthetic peptide"
TGWVGSYYYYMDV

SEQ ID NO: 173 - protein, 12 aa, Artificial Sequence
  source: /note="Description of Artificial Sequence: Synthetic peptide"
GYSRYYYYGMDV

SEQ ID NO: 174 - protein, 13 aa, Artificial Sequence
  source: /note="Description of Artificial Sequence: Synthetic peptide"
REAAAGHDWYFDL

SEQ ID NO: 175 - protein, 11 aa, Artificial Sequence
  source: /note="Description of Artificial Sequence: Synthetic peptide"
SPRVTTGYFDY

SEQ ID NO: 176 - protein, 13 aa, Artificial Sequence
  source: /note="Description of Artificial Sequence: Synthetic peptide"
SVVGRSAPYYFDY

SEQ ID NO: 177 - protein, 13 aa, Artificial Sequence
  source: /note="Description of Artificial Sequence: Synthetic peptide"
IRSCGGDCYYFDN

SEQ ID NO: 178 - protein, 9 aa, Artificial Sequence
  source: /note="Description of Artificial Sequence: Synthetic peptide"
QGFDGYEAN

SEQ ID NO: 179 - protein, 10 aa, Artificial Sequence
  source: /note="Description of Artificial Sequence: Synthetic peptide"
GGYDGRGFDY

SEQ ID NO: 180 - protein, 11 aa, Artificial Sequence
  source: /note="Description of Artificial Sequence: Synthetic peptide"
RASQSVSSNFA

SEQ ID NO: 181 - protein, 11 aa, Artificial Sequence
  source: /note="Description of Artificial Sequence: Synthetic peptide"
QASQDISNSLN

SEQ ID NO: 182 - protein, 11 aa, Artificial Sequence
  source: /note="Description of Artificial Sequence: Synthetic peptide"
RASQSINTYLN

SEQ ID NO: 183 - protein, 11 aa, Artificial Sequence
  source: /note="Description of Artificial Sequence: Synthetic peptide"
RASQSISDRLA

SEQ ID NO: 184 - protein, 11 aa, Artificial Sequence
  source: /note="Description of Artificial Sequence: Synthetic peptide"
RASQSIRYYLS

SEQ ID NO: 185 - protein, 11 aa, Artificial Sequence
  source: /note="Description of Artificial Sequence: Synthetic peptide"
RASQGVGRWLA

SEQ ID NO: 186 - protein, 12 aa, Artificial Sequence
  source: /note="Description of Artificial Sequence: Synthetic peptide"
RASQSVYTKYLG

SEQ ID NO: 187 - protein, 11 aa, Artificial Sequence
  source: /note="Description of Artificial Sequence: Synthetic peptide"
RASQDSGTWLA

SEQ ID NO: 188 - protein, 11 aa, Artificial Sequence
  source: /note="Description of Artificial Sequence: Synthetic peptide"
RASQDISSALA

SEQ ID NO: 189 - protein, 17 aa, Artificial Sequence
  source: /note="Description of Artificial Sequence: Synthetic peptide"
KSSHSVLYNRNNKNYLA

SEQ ID NO: 190 - protein, 11 aa, Artificial Sequence
  source: /note="Description of Artificial Sequence: Synthetic peptide"
RASQSIRYYLS

SEQ ID NO: 191 - protein, 11 aa, Artificial Sequence
  source: /note="Description of Artificial Sequence: Synthetic peptide"
RASQSISTWLA

SEQ ID NO: 192 - protein, 12 aa, Artificial Sequence
  source: /note="Description of Artificial Sequence: Synthetic peptide"
RASQSVTSNYLA

SEQ ID NO: 193 - protein, 11 aa, Artificial Sequence
  source: /note="Description of Artificial Sequence: Synthetic peptide"
RASENVNIWLA

SEQ ID NO: 194 - protein, 11 aa, Artificial Sequence
  source: /note="Description of Artificial Sequence: Synthetic peptide"
QGDALRSYYAS

SEQ ID NO: 195 - protein, 11 aa, Artificial Sequence
  source: /note="Description of Artificial Sequence: Synthetic peptide"
QGDSLRSYYAS

SEQ ID NO: 196 - protein, 11 aa, Artificial Sequence
  source: /note="Description of Artificial Sequence: Synthetic peptide"
QGDSLRSYYAS

SEQ ID NO: 197 - protein, 12 aa, Artificial Sequence
  source: /note="Description of Artificial Sequence: Synthetic peptide"
RASQSVSSNYLA

SEQ ID NO: 198 - protein, 12 aa, Artificial Sequence
  source: /note="Description of Artificial Sequence: Synthetic peptide"
RASQSVYTKYLG

SEQ ID NO: 199 - protein, 11 aa, Artificial Sequence
  source: /note="Description of Artificial Sequence: Synthetic peptide"
RASQSISSYLN

SEQ ID NO: 200 - protein, 11 aa, Artificial Sequence
  source: /note="Description of Artificial Sequence: Synthetic peptide"
RASQSISSWLA

SEQ ID NO: 201 - protein, 10 aa, Artificial Sequence
  source: /note="Description of Artificial Sequence: Synthetic peptide"
RASQGISDYS

SEQ ID NO: 202 - protein, 11 aa, Artificial Sequence
  source: /note="Description of Artificial Sequence: Synthetic peptide"
RASENVNIWLA

SEQ ID NO: 203 - protein, 11 aa, Artificial Sequence
  source: /note="Description of Artificial Sequence: Synthetic peptide"
RASRGISSALA

SEQ ID NO: 204 - protein, 10 aa, Artificial Sequence
  source: /note="Description of Artificial Sequence: Synthetic peptide"
SASSSVSYMH

SEQ ID NO: 205 - protein, 7 aa, Artificial Sequence
  source: /note="Description of Artificial Sequence: Synthetic peptide"
DASNRAT

SEQ ID NO: 206 - protein, 7 aa, Artificial Sequence
  source: /note="Description of Artificial Sequence: Synthetic peptide"
DASTLET

SEQ ID NO: 207 - protein, 7 aa, Artificial Sequence
  source: /note="Description of Artificial Sequence: Synthetic peptide"
AASSLQS

SEQ ID NO: 208 - protein, 7 aa, Artificial Sequence
  source: /note="Description of Artificial Sequence: Synthetic peptide"
KASSLES

SEQ ID NO: 209 - protein, 7 aa, Artificial Sequence
  source: /note="Description of Artificial Sequence: Synthetic peptide"
TASILQN

SEQ ID NO: 210 - protein, 7 aa, Artificial Sequence
  source: /note="Description of Artificial Sequence: Synthetic peptide"
AASTLQS

SEQ ID NO: 211 - protein, 7 aa, Artificial Sequence
  source: /note="Description of Artificial Sequence: Synthetic peptide"
DASTRAT

SEQ ID NO: 212 - protein, 7 aa, Artificial Sequence
  source: /note="Description of Artificial Sequence: Synthetic peptide"
DASTLED

SEQ ID NO: 213 - protein, 7 aa, Artificial Sequence
  source: /note="Description of Artificial Sequence: Synthetic peptide"
DASSLES

SEQ ID NO: 214 - protein, 7 aa, Artificial Sequence
  source: /note="Description of Artificial Sequence: Synthetic peptide"
WASTRKS

SEQ ID NO: 215 - protein, 7 aa, Artificial Sequence
  source: /note="Description of Artificial Sequence: Synthetic peptide"
TASILQN

SEQ ID NO: 216 - protein, 7 aa, Artificial Sequence
  source: /note="Description of Artificial Sequence: Synthetic peptide"
KASTLES

SEQ ID NO: 217 - protein, 7 aa, Artificial Sequence
  source: /note="Description of Artificial Sequence: Synthetic peptide"
GASTRAT

SEQ ID NO: 218 - protein, 7 aa, Artificial Sequence
  source: /note="Description of Artificial Sequence: Synthetic peptide"
KSSSLAS

SEQ ID NO: 219 - protein, 7 aa, Artificial Sequence
  source: /note="Description of Artificial Sequence: Synthetic peptide"
GKNNRPS

SEQ ID NO: 220 - protein, 7 aa, Artificial Sequence
  source: /note="Description of Artificial Sequence: Synthetic peptide"
GRSRRPS

SEQ ID NO: 221 - protein, 7 aa, Artificial Sequence
  source: /note="Description of Artificial Sequence: Synthetic peptide"
GKNNRPS

SEQ ID NO: 222 - protein, 7 aa, Artificial Sequence
  source: /note="Description of Artificial Sequence: Synthetic peptide"
DVSTRAT

SEQ ID NO: 223 - protein, 7 aa, Artificial Sequence
  source: /note="Description of Artificial Sequence: Synthetic peptide"
DASTRAT

SEQ ID NO: 224 - protein, 7 aa, Artificial Sequence
  source: /note="Description of Artificial Sequence: Synthetic peptide"
AASSLQS

SEQ ID NO: 225 - protein, 7 aa, Artificial Sequence
  source: /note="Description of Artificial Sequence: Synthetic peptide"
KASSLES

SEQ ID NO: 226 - protein, 7 aa, Artificial Sequence
  source: /note="Description of Artificial Sequence: Synthetic peptide"
AASTLQS

SEQ ID NO: 227 - protein, 7 aa, Artificial Sequence
  source: /note="Description of Artificial Sequence: Synthetic peptide"
KSSSLAS

SEQ ID NO: 228 - protein, 7 aa, Artificial Sequence
  source: /note="Description of Artificial Sequence: Synthetic peptide"
DASSLES

SEQ ID NO: 229 - protein, 7 aa, Artificial Sequence
  source: /note="Description of Artificial Sequence: Synthetic peptide"
DTSKLAS

SEQ ID NO: 230 - protein, 9 aa, Artificial Sequence
  source: /note="Description of Artificial Sequence: Synthetic peptide"
HQRSNWLYT

SEQ ID NO: 231 - protein, 9 aa, Artificial Sequence
  source: /note="Description of Artificial Sequence: Synthetic peptide"
QQHDNLPLT

SEQ ID NO: 232 - protein, 8 aa, Artificial Sequence
  source: /note="Description of Artificial Sequence: Synthetic peptide"
QQSFSPLT

SEQ ID NO: 233 - protein, 10 aa, Artificial Sequence
  source: /note="Description of Artificial Sequence: Synthetic peptide"
QQYGHLPMYT

SEQ ID NO: 234 - protein, 8 aa, Artificial Sequence
  source: /note="Description of Artificial Sequence: Synthetic peptide"
LQTYTTPD

SEQ ID NO: 235 - protein, 9 aa, Artificial Sequence
  source: /note="Description of Artificial Sequence: Synthetic peptide"
QQANSFPLT

SEQ ID NO: 236 - protein, 10 aa, Artificial Sequence
  source: /note="Description of Artificial Sequence: Synthetic peptide"
QHYGGSPLIT

SEQ ID NO: 237 - protein, 9 aa, Artificial Sequence
  source: /note="Description of Artificial Sequence: Synthetic peptide"
QQYNSYPLT

SEQ ID NO: 238 - protein, 9 aa, Artificial Sequence
  source: /note="Description of Artificial Sequence: Synthetic peptide"
QQFSSYPLT

SEQ ID NO: 239 - protein, 9 aa, Artificial Sequence
  source: /note="Description of Artificial Sequence: Synthetic peptide"
QQTQTFPLT

SEQ ID NO: 240 - protein, 8 aa, Artificial Sequence
  source: /note="Description of Artificial Sequence: Synthetic peptide"
LQTYTTPD

SEQ ID NO: 241 - protein, 10 aa, Artificial Sequence
  source: /note="Description of Artificial Sequence: Synthetic peptide"
QQYNTYSPYT

SEQ ID NO: 242 - protein, 9 aa, Artificial Sequence
  source: /note="Description of Artificial Sequence: Synthetic peptide"
QQYGSAPVT

SEQ ID NO: 243 - protein, 9 aa, Artificial Sequence
  source: /note="Description of Artificial Sequence: Synthetic peptide"
QQYQSYPLT

SEQ ID NO: 244 - protein, 10 aa, Artificial Sequence
  source: /note="Description of Artificial Sequence: Synthetic peptide"
NSRDSSGYPV

SEQ ID NO: 245 - protein, 11 aa, Artificial Sequence
  source: /note="Description of Artificial Sequence: Synthetic peptide"
NSRDNTANHYV

SEQ ID NO: 246 - protein, 11 aa, Artificial Sequence
  source: /note="Description of Artificial Sequence: Synthetic peptide"
NSRGSSGNHYV

SEQ ID NO: 247 - protein, 10 aa, Artificial Sequence
  source: /note="Description of Artificial Sequence: Synthetic peptide"
QQRSNWPPWT

SEQ ID NO: 248 - protein, 10 aa, Artificial Sequence
  source: /note="Description of Artificial Sequence: Synthetic peptide"
QHYGGSPLIT

SEQ ID NO: 249 - protein, 9 aa, Artificial Sequence
  source: /note="Description of Artificial Sequence: Synthetic peptide"
QQSYSIPLT

SEQ ID NO: 250 - protein, 9 aa, Artificial Sequence
  source: /note="Description of Artificial Sequence: Synthetic peptide"
QQYSSYPLT

SEQ ID NO: 251 - protein, 9 aa, Artificial Sequence
  source: /note="Description of Artificial Sequence: Synthetic peptide"
QQYYSYPLT

SEQ ID NO: 252 - protein, 9 aa, Artificial Sequence
  source: /note="Description of Artificial Sequence: Synthetic peptide"
QQYQSYPLT

SEQ ID NO: 253 - protein, 9 aa, Artificial Sequence
  source: /note="Description of Artificial Sequence: Synthetic peptide"
QQSYSTPWT

SEQ ID NO: 254 - protein, 9 aa, Artificial Sequence
  source: /note="Description of Artificial Sequence: Synthetic peptide"
QQWSGYPLT

SEQ ID NO: 255 - protein, 10 aa, Artificial Sequence
  source: /note="Description of Artificial Sequence: Synthetic peptide"
GVSLPDYGVS

SEQ ID NO: 256 - protein, 16 aa, Artificial Sequence
  source: /note="Description of Artificial Sequence: Synthetic peptide"
VIWGSETTYYNSALKS

SEQ ID NO: 257 - protein, 16 aa, Artificial Sequence
  source: /note="Description of Artificial Sequence: Synthetic peptide"
VIWGSETTYYSSSLKS

SEQ ID NO: 258 - protein, 16 aa, Artificial Sequence
  source: /note="Description of Artificial Sequence: Synthetic peptide"
VIWGSETTYYQSSLKS

SEQ ID NO: 259 - protein, 16 aa, Artificial Sequence
  source: /note="Description of Artificial Sequence: Synthetic peptide"
VIWGSETTYYNSSLKS

SEQ ID NO: 260 - protein, 12 aa, Artificial Sequence
  source: /note="Description of Artificial Sequence: Synthetic peptide"
HYYYGGSYAMDY

SEQ ID NO: 261 - protein, 11 aa, Artificial Sequence
  source: /note="Description of Artificial Sequence: Synthetic peptide"
RASQDISKYLN

SEQ ID NO: 262 - protein, 7 aa, Artificial Sequence
  source: /note="Description of Artificial Sequence: Synthetic peptide"
HTSRLHS

SEQ ID NO: 263 - protein, 9 aa, Artificial Sequence
  source: /note="Description of Artificial Sequence: Synthetic peptide"
QQGNTLPYT

SEQ ID NO: 264 - protein, 4 aa, Artificial Sequence
  source: /note="Description of Artificial Sequence: Synthetic peptide"
RGDS

SEQ ID NO: 265 - DNA, 5000 bp, Artificial Sequence
  source: /note="Description of Artificial Sequence: Synthetic polynucleotide"
  misc_feature (1)..(5000): /note="This sequence may encompass 50-5000 nucleotides"
  source: /note="See specification as filed for detailed description of substitutions and preferred embodiments"
tttttttttttttttttttttttttttttttttttttttttttttttttttttttttttttttttttttttttttttttttttttttttttttttttttttttttttttttttttttttttttttttttttttttttttttttttttttttttttttttttttttttttttttttttttttttttttttttttttttttttttttttttttttttttttttttttttttttttttttttttttttttttttttttttttttttttttttttttttttttttttttttttttttttttttttttttttttttttttttttttttttttttttttttttttttttttttttttttttttttttttttttttttttttttttttttttttttttttttttttttttttttttttttttttttttttttttttttttttttttttttttttttttttttttttttttttttttttttttttttttttttttttttttttttttttttttttttttttttttttttttttttttttttttttttttttttttttttttttttttttttttttttttttttttttttttttttttttttttttttttttttttttttttttttttttttttttttttttttttttttttttttttttttttttttttttttttttttttttttttttttttttttttttttttttttttttttttttttttttttttttttttttttttttttttttttttttttttttttttttttttttttttttttttttttttttttttttttttttttttttttttttttttttttttttttttttttttttttttttttttttttttttttttttttttttttttttttttttttttttttttttttttttttttttttttttttttttttttttttttttttttttttttttttttttttttttttttttttttttttttttttttttttttttttttttttttttttttttttttttttttttttttttttttttttttttttttttttttttttttttttttttttttttttttttttttttttttttttttttttttttttttttttttttttttttttttttttttttttttttttttttttttttttttttttttttttttttttttttttttttttttttttttttttttttttttttttttttttttttttttttttttttttttttttttttttttttttttttttttttttttttttttttttttttttttttttttttttttttttttttttttttttttttttttttttttttttttttttttttttttttttttttttttttttttttttttttttttttttttttttttttttttttttttttttttttttttttttttttttttttttttttttttttttttttttttttttttttttttttttttttttttttttttttttttttttttttttttttttttttttttttttttttttttttttttttttttttttttttttttttttttttttttttttttttttttttttttttttttttttttttttttttttttttttttttttttttttttttttttttttttttttttttttttttttttttttttttttttttttttttttttttttttttttttttttttttttttttttttttttttttttttttttttttttttttttttttttttttttttttttttttttttttttttttttttttttttttttttttttttttttttttttttttttttttttttttttttttttttttttttttttttttttttttttttttttttttttttttttttttttttttttttttttttttttttttttttttttttttttttttttttttttttttttttttttttttttttttttttttttttttttttttttttttttttttttttttttttttttttttttttttttttttttttttttttttttttttttttttttttttttttttttttttttttttttttttttttttttttttttttttttttttttttttttttttttttttttttttttttttttttttttttttttttttttttttttttttttttttttttttttttttttttttttttttttttttttttttttttttttttttttttttttttttttttttttttttttttttttttttttttttttttttttttttttttttttttttttttttttttttttttttttttttttttttttttttttttttttttttttttttttttttttttttttttttttttttttttttttttttttttttttttttttttttttttttttttttttttttttttttttttttttttttttttttttttttttttttttttttttttttttttttttttttttttttttttttttttttttttttttttttttttttttttttttttttttttttttttttttttttttttttttttttttttttttttttttttttttttttttttttttttttttttttttttttttttttttttttttttttttttttttttttttttttttttttttttttttttttttttttttttttttttttttttttttttttttttttttttttttttttttttttttttttttttttttttttttttttttttttttttttttttttttttttttttttttttttttttttttttttttttttttttttttttttttttttttttttttttttttttttttttttttttttttttttttttttttttttttttttttttttttttttttttttttttttttttttttttttttttttttttttttttttttttttttttttttttttttttttttttttttttttttttttttttttttttttttttttttttttttttttttttttttttttttttttttttttttttttttttttttttttttttttttttttttttttttttttttttttttttttttttttttttttttttttttttttttttttttttttttttttttttttttttttttttttttttttttttttttttttttttttttttttttttttttttttttttttttttttttttttttttttttttttttttttttttttttttttttttttttttttttttttttttttttttttttttttttttttttttttttttttttttttttttttttttttttttttttttttttttttttttttttttttttttttttttttttttttttttttttttttttttttttttttttttttttttttttttttttttttttttttttttttttttttttttttttttttttttttttttttttttttttttttttttttttttttttttttttttttttttttttttttttttttttttttttttttttttttttttttttttttttttttttttttttttttttttttttttttttttttttttttttttttttttttttttttttttttttttttttttttttttttttttttttttttttttttttttttttttttttttttttttttttttttttttttttttttttttttttttttttttttttttttttttttttttttttttttttttttttttttttttttttttttttttttttttttttttttttttttttttttttttttttttttttttttttttttttttttttttttttttttttttttttttttttttttttttttttttttttttttttttttttttttttttttttttttttttttttttttttttttttttttttttttttttttttttttttttttttttttttttttttttttttttttttttttttttttttttttttttttttttttttttttttttttttttttttttttttttttttttttttttttttttttttttttttttttttttttttttttttttttttttttttttttttttttttttttttttttttttttttttttttttttttttttttttttttttttttttttttttttttttttttttttttttttttttttttttttttttttttttttttttttttttttttttttttttttttttttttttttttttttttttttttttttttttttttttttttttttttttttttttttttttttttttttttttttttttttttttttttttttttttttttttttttttttttttttttttttttttttttttttttttttttttttttttttttttttttttttttttttttttttttttttttttttttttttttttttttttttttttttttttttttttttttttttttttttttttttttttttttttttttttttttttttttttttttttttttttttttttttttttttttttttttttttttttttttttttttttttttttttttttttttttttttttttttttttttttttttttttttttttttttttttttttttttttttttttttttttttttttttttttttttttttttttttttttttttttttttttttttttttttttttttttttttttttttttttttttttttttttttttttttttttttttttttttttttttttttttttttttttttttttttttttttttttttttttttttttttttttttttttttttttttttttttttttttttttttttttttttttttttttttttttttttttttttttttttttttttttttttttttttttttttttttttttttttttttttttttttttttttttttttttttttttttttttttttttttttttttttttttttttttttttttttttttttttttttttttttttttttttttttttttttttttttttttttttttttttttttttttttttttttttttttttttttttttttttttttttttttttttttttttttttttttttttttttttttttttt

SEQ ID NO: 266-268 - skipped (3 entries)

SEQ ID NO: 269 - protein, 486 aa, Artificial Sequence
  source: /note="Description of Artificial Sequence: Synthetic polypeptide"
MALPVTALLLPLALLLHAARPEIVMTQSPATLSLSPGERATLSCRASQDISKYLNWYQQKPGQAPRLLIYHTSRLHSGIPARFSGSGSGTDYTLTISSLQPEDFAVYFCQQGNTLPYTFGQGTKLEIKGGGGSGGGGSGGGGSQVQLQESGPGLVKPSETLSLTCTVSGVSLPDYGVSWIRQPPGKGLEWIGVIWGSETTYYSSSLKSRVTISKDNSKNQVSLKLSSVTAADTAVYYCAKHYYYGGSYAMDYWGQGTLVTVSSTTTPAPRPPTPAPTIASQPLSLRPEACRPAAGGAVHTRGLDFACDIYIWAPLAGTCGVLLLSLVITLYCKRGRKKLLYIFKQPFMRPVQTTQEEDGCSCRFPEEEEGGCELRVKFSRSADAPAYKQGQNQLYNELNLGRREEYDVLDKRRGRDPEMGGKPRRKNPQEGLYNELQKDKMAEAYSEIGMKGERRRGKGHDGLYQGLSTATKDTYDALHMQALPPR

SEQ ID NO: 270 - protein, 486 aa, Artificial Sequence
  source: /note="Description of Artificial Sequence: Synthetic polypeptide"
MALPVTALLLPLALLLHAARPEIVMTQSPATLSLSPGERATLSCRASQDISKYLNWYQQKPGQAPRLLIYHTSRLHSGIPARFSGSGSGTDYTLTISSLQPEDFAVYFCQQGNTLPYTFGQGTKLEIKGGGGSGGGGSGGGGSQVQLQESGPGLVKPSETLSLTCTVSGVSLPDYGVSWIRQPPGKGLEWIGVIWGSETTYYQSSLKSRVTISKDNSKNQVSLKLSSVTAADTAVYYCAKHYYYGGSYAMDYWGQGTLVTVSSTTTPAPRPPTPAPTIASQPLSLRPEACRPAAGGAVHTRGLDFACDIYIWAPLAGTCGVLLLSLVITLYCKRGRKKLLYIFKQPFMRPVQTTQEEDGCSCRFPEEEEGGCELRVKFSRSADAPAYKQGQNQLYNELNLGRREEYDVLDKRRGRDPEMGGKPRRKNPQEGLYNELQKDKMAEAYSEIGMKGERRRGKGHDGLYQGLSTATKDTYDALHMQALPPR

SEQ ID NO: 271 - protein, 486 aa, Artificial Sequence
  source: /note="Description of Artificial Sequence: Synthetic polypeptide"
MALPVTALLLPLALLLHAARPQVQLQESGPGLVKPSETLSLTCTVSGVSLPDYGVSWIRQPPGKGLEWIGVIWGSETTYYSSSLKSRVTISKDNSKNQVSLKLSSVTAADTAVYYCAKHYYYGGSYAMDYWGQGTLVTVSSGGGGSGGGGSGGGGSEIVMTQSPATLSLSPGERATLSCRASQDISKYLNWYQQKPGQAPRLLIYHTSRLHSGIPARFSGSGSGTDYTLTISSLQPEDFAVYFCQQGNTLPYTFGQGTKLEIKTTTPAPRPPTPAPTIASQPLSLRPEACRPAAGGAVHTRGLDFACDIYIWAPLAGTCGVLLLSLVITLYCKRGRKKLLYIFKQPFMRPVQTTQEEDGCSCRFPEEEEGGCELRVKFSRSADAPAYKQGQNQLYNELNLGRREEYDVLDKRRGRDPEMGGKPRRKNPQEGLYNELQKDKMAEAYSEIGMKGERRRGKGHDGLYQGLSTATKDTYDALHMQALPPR

SEQ ID NO: 272 - protein, 486 aa, Artificial Sequence
  source: /note="Description of Artificial Sequence: Synthetic polypeptide"
MALPVTALLLPLALLLHAARPQVQLQESGPGLVKPSETLSLTCTVSGVSLPDYGVSWIRQPPGKGLEWIGVIWGSETTYYQSSLKSRVTISKDNSKNQVSLKLSSVTAADTAVYYCAKHYYYGGSYAMDYWGQGTLVTVSSGGGGSGGGGSGGGGSEIVMTQSPATLSLSPGERATLSCRASQDISKYLNWYQQKPGQAPRLLIYHTSRLHSGIPARFSGSGSGTDYTLTISSLQPEDFAVYFCQQGNTLPYTFGQGTKLEIKTTTPAPRPPTPAPTIASQPLSLRPEACRPAAGGAVHTRGLDFACDIYIWAPLAGTCGVLLLSLVITLYCKRGRKKLLYIFKQPFMRPVQTTQEEDGCSCRFPEEEEGGCELRVKFSRSADAPAYKQGQNQLYNELNLGRREEYDVLDKRRGRDPEMGGKPRRKNPQEGLYNELQKDKMAEAYSEIGMKGERRRGKGHDGLYQGLSTATKDTYDALHMQALPPR

SEQ ID NO: 273 - protein, 491 aa, Artificial Sequence
  source: /note="Description of Artificial Sequence: Synthetic polypeptide"
MALPVTALLLPLALLLHAARPEIVMTQSPATLSLSPGERATLSCRASQDISKYLNWYQQKPGQAPRLLIYHTSRLHSGIPARFSGSGSGTDYTLTISSLQPEDFAVYFCQQGNTLPYTFGQGTKLEIKGGGGSGGGGSGGGGSGGGGSQVQLQESGPGLVKPSETLSLTCTVSGVSLPDYGVSWIRQPPGKGLEWIGVIWGSETTYYSSSLKSRVTISKDNSKNQVSLKLSSVTAADTAVYYCAKHYYYGGSYAMDYWGQGTLVTVSSTTTPAPRPPTPAPTIASQPLSLRPEACRPAAGGAVHTRGLDFACDIYIWAPLAGTCGVLLLSLVITLYCKRGRKKLLYIFKQPFMRPVQTTQEEDGCSCRFPEEEEGGCELRVKFSRSADAPAYKQGQNQLYNELNLGRREEYDVLDKRRGRDPEMGGKPRRKNPQEGLYNELQKDKMAEAYSEIGMKGERRRGKGHDGLYQGLSTATKDTYDALHMQALPPR

SEQ ID NO: 274 - protein, 491 aa, Artificial Sequence
  source: /note="Description of Artificial Sequence: Synthetic polypeptide"
MALPVTALLLPLALLLHAARPEIVMTQSPATLSLSPGERATLSCRASQDISKYLNWYQQKPGQAPRLLIYHTSRLHSGIPARFSGSGSGTDYTLTISSLQPEDFAVYFCQQGNTLPYTFGQGTKLEIKGGGGSGGGGSGGGGSGGGGSQVQLQESGPGLVKPSETLSLTCTVSGVSLPDYGVSWIRQPPGKGLEWIGVIWGSETTYYQSSLKSRVTISKDNSKNQVSLKLSSVTAADTAVYYCAKHYYYGGSYAMDYWGQGTLVTVSSTTTPAPRPPTPAPTIASQPLSLRPEACRPAAGGAVHTRGLDFACDIYIWAPLAGTCGVLLLSLVITLYCKRGRKKLLYIFKQPFMRPVQTTQEEDGCSCRFPEEEEGGCELRVKFSRSADAPAYKQGQNQLYNELNLGRREEYDVLDKRRGRDPEMGGKPRRKNPQEGLYNELQKDKMAEAYSEIGMKGERRRGKGHDGLYQGLSTATKDTYDALHMQALPPR

SEQ ID NO: 275 - protein, 491 aa, Artificial Sequence
  source: /note="Description of Artificial Sequence: Synthetic polypeptide"
MALPVTALLLPLALLLHAARPQVQLQESGPGLVKPSETLSLTCTVSGVSLPDYGVSWIRQPPGKGLEWIGVIWGSETTYYSSSLKSRVTISKDNSKNQVSLKLSSVTAADTAVYYCAKHYYYGGSYAMDYWGQGTLVTVSSGGGGSGGGGSGGGGSGGGGSEIVMTQSPATLSLSPGERATLSCRASQDISKYLNWYQQKPGQAPRLLIYHTSRLHSGIPARFSGSGSGTDYTLTISSLQPEDFAVYFCQQGNTLPYTFGQGTKLEIKTTTPAPRPPTPAPTIASQPLSLRPEACRPAAGGAVHTRGLDFACDIYIWAPLAGTCGVLLLSLVITLYCKRGRKKLLYIFKQPFMRPVQTTQEEDGCSCRFPEEEEGGCELRVKFSRSADAPAYKQGQNQLYNELNLGRREEYDVLDKRRGRDPEMGGKPRRKNPQEGLYNELQKDKMAEAYSEIGMKGERRRGKGHDGLYQGLSTATKDTYDALHMQALPPR

SEQ ID NO: 276 - protein, 491 aa, Artificial Sequence
  source: /note="Description of Artificial Sequence: Synthetic polypeptide"
MALPVTALLLPLALLLHAARPQVQLQESGPGLVKPSETLSLTCTVSGVSLPDYGVSWIRQPPGKGLEWIGVIWGSETTYYQSSLKSRVTISKDNSKNQVSLKLSSVTAADTAVYYCAKHYYYGGSYAMDYWGQGTLVTVSSGGGGSGGGGSGGGGSGGGGSEIVMTQSPATLSLSPGERATLSCRASQDISKYLNWYQQKPGQAPRLLIYHTSRLHSGIPARFSGSGSGTDYTLTISSLQPEDFAVYFCQQGNTLPYTFGQGTKLEIKTTTPAPRPPTPAPTIASQPLSLRPEACRPAAGGAVHTRGLDFACDIYIWAPLAGTCGVLLLSLVITLYCKRGRKKLLYIFKQPFMRPVQTTQEEDGCSCRFPEEEEGGCELRVKFSRSADAPAYKQGQNQLYNELNLGRREEYDVLDKRRGRDPEMGGKPRRKNPQEGLYNELQKDKMAEAYSEIGMKGERRRGKGHDGLYQGLSTATKDTYDALHMQALPPR

SEQ ID NO: 277 - protein, 491 aa, Artificial Sequence
  source: /note="Description of Artificial Sequence: Synthetic polypeptide"
MALPVTALLLPLALLLHAARPEIVMTQSPATLSLSPGERATLSCRASQDISKYLNWYQQKPGQAPRLLIYHTSRLHSGIPARFSGSGSGTDYTLTISSLQPEDFAVYFCQQGNTLPYTFGQGTKLEIKGGGGSGGGGSGGGGSGGGGSQVQLQESGPGLVKPSETLSLTCTVSGVSLPDYGVSWIRQPPGKGLEWIGVIWGSETTYYNSSLKSRVTISKDNSKNQVSLKLSSVTAADTAVYYCAKHYYYGGSYAMDYWGQGTLVTVSSTTTPAPRPPTPAPTIASQPLSLRPEACRPAAGGAVHTRGLDFACDIYIWAPLAGTCGVLLLSLVITLYCKRGRKKLLYIFKQPFMRPVQTTQEEDGCSCRFPEEEEGGCELRVKFSRSADAPAYKQGQNQLYNELNLGRREEYDVLDKRRGRDPEMGGKPRRKNPQEGLYNELQKDKMAEAYSEIGMKGERRRGKGHDGLYQGLSTATKDTYDALHMQALPPR

SEQ ID NO: 278 - protein, 491 aa, Artificial Sequence; identical to SEQ ID NO: 277
  source: /note="Description of Artificial Sequence: Synthetic polypeptide"

SEQ ID NO: 279 - protein, 491 aa, Artificial Sequence
  source: /note="Description of Artificial Sequence: Synthetic polypeptide"
MALPVTALLLPLALLLHAARPQVQLQESGPGLVKPSETLSLTCTVSGVSLPDYGVSWIRQPPGKGLEWIGVIWGSETTYYNSSLKSRVTISKDNSKNQVSLKLSSVTAADTAVYYCAKHYYYGGSYAMDYWGQGTLVTVSSGGGGSGGGGSGGGGSGGGGSEIVMTQSPATLSLSPGERATLSCRASQDISKYLNWYQQKPGQAPRLLIYHTSRLHSGIPARFSGSGSGTDYTLTISSLQPEDFAVYFCQQGNTLPYTFGQGTKLEIKTTTPAPRPPTPAPTIASQPLSLRPEACRPAAGGAVHTRGLDFACDIYIWAPLAGTCGVLLLSLVITLYCKRGRKKLLYIFKQPFMRPVQTTQEEDGCSCRFPEEEEGGCELRVKFSRSADAPAYKQGQNQLYNELNLGRREEYDVLDKRRGRDPEMGGKPRRKNPQEGLYNELQKDKMAEAYSEIGMKGERRRGKGHDGLYQGLSTATKDTYDALHMQALPPR

SEQ ID NO: 280 - protein, 486 aa, Artificial Sequence
  source: /note="Description of Artificial Sequence: Synthetic polypeptide"
MALPVTALLLPLALLLHAARPEIVMTQSPATLSLSPGERATLSCRASQDISKYLNWYQQKPGQAPRLLIYHTSRLHSGIPARFSGSGSGTDYTLTISSLQPEDFAVYFCQQGNTLPYTFGQGTKLEIKGGGGSGGGGSGGGGSQVQLQESGPGLVKPSETLSLTCTVSGVSLPDYGVSWIRQPPGKGLEWIGVIWGSETTYYNSSLKSRVTISKDNSKNQVSLKLSSVTAADTAVYYCAKHYYYGGSYAMDYWGQGTLVTVSSTTTPAPRPPTPAPTIASQPLSLRPEACRPAAGGAVHTRGLDFACDIYIWAPLAGTCGVLLLSLVITLYCKRGRKKLLYIFKQPFMRPVQTTQEEDGCSCRFPEEEEGGCELRVKFSRSADAPAYKQGQNQLYNELNLGRREEYDVLDKRRGRDPEMGGKPRRKNPQEGLYNELQKDKMAEAYSEIGMKGERRRGKGHDGLYQGLSTATKDTYDALHMQALPPR

SEQ ID NO: 281 - protein, 486 aa, Artificial Sequence
  source: /note="Description of Artificial Sequence: Synthetic polypeptide"
MALPVTALLLPLALLLHAARPDIQMTQTTSSLSASLGDRVTISCRASQDISKYLNWYQQKPDGTVKLLIYHTSRLHSGVPSRFSGSGSGTDYSLTISNLEQEDIATYFCQQGNTLPYTFGGGTKLEITGGGGSGGGGSGGGGSEVKLQESGPGLVAPSQSLSVTCTVSGVSLPDYGVSWIRQPPRKGLEWLGVIWGSETTYYNSALKSRLTIIKDNSKSQVFLKMNSLQTDDTAIYYCAKHYYYGGSYAMDYWGQGTSVTVSSTTTPAPRPPTPAPTIASQPLSLRPEACRPAAGGAVHTRGLDFACDIYIWAPLAGTCGVLLLSLVITLYCKRGRKKLLYIFKQPFMRPVQTTQEEDGCSCRFPEEEEGGCELRVKFSRSADAPAYKQGQNQLYNELNLGRREEYDVLDKRRGRDPEMGGKPRRKNPQEGLYNELQKDKMAEAYSEIGMKGERRRGKGHDGLYQGLSTATKDTYDALHMQALPPR

SEQ ID NO: 282 - protein, 488 aa, Artificial Sequence
  source: /note="Description of Artificial Sequence: Synthetic polypeptide"
MALPVTALLLPLALLLHAARPQVQLQQSGAEVKKPGASVKVSCKASGYTFTGYYMHWVRQAPGQGLEWMGRINPNSGGTNYAQKFQGRVTMTRDTSISTAYMELSRLRSEDTAVYYCARGRYYGMDVWGQGTMVTVSSGGGGSGGGGSGGGGSGGGGSEIVLTQSPATLSLSPGERATISCRASQSVSSNFAWYQQRPGQAPRLLIYDASNRATGIPPRFSGSGSGTDFTLTISSLEPEDFAAYYCHQRSNWLYTFGQGTKVDIKTTTPAPRPPTPAPTIASQPLSLRPEACRPAAGGAVHTRGLDFACDIYIWAPLAGTCGVLLLSLVITLYCKRGRKKLLYIFKQPFMRPVQTTQEEDGCSCRFPEEEEGGCELRVKFSRSADAPAYKQGQNQLYNELNLGRREEYDVLDKRRGRDPEMGGKPRRKNPQEGLYNELQKDKMAEAYSEIGMKGERRRGKGHDGLYQGLSTATKDTYDALHMQALPPR

SEQ ID NO: 283 - protein, 497 aa, Artificial Sequence
  source: /note="Description of Artificial Sequence: Synthetic polypeptide"
MALPVTALLLPLALLLHAARPQVQLVQSGAEVKKPGASVKVSCKASGYTFTGYYMHWVRQAPGQGLEWMGWINPNSGGTNYAQKFQGRVTMTRDTSISTAYMELSRLRSDDTAVYYCARDLRRTVVTPRAYYGMDVWGQGTTVTVSSGGGGSGGGGSGGGGSGGGGSDIQLTQSPSTLSASVGDRVTITCQASQDISNSLNWYQQKAGKAPKLLIYDASTLETGVPSRFSGSGSGTDFSFTISSLQPEDIATYYCQQHDNLPLTFGQGTKVEIKTTTPAPRPPTPAPTIASQPLSLRPEACRPAAGGAVHTRGLDFACDIYIWAPLAGTCGVLLLSLVITLYCKRGRKKLLYIFKQPFMRPVQTTQEEDGCSCRFPEEEEGGCELRVKFSRSADAPAYKQGQNQLYNELNLGRREEYDVLDKRRGRDPEMGGKPRRKNPQEGLYNELQKDKMAEAYSEIGMKGERRRGKGHDGLYQGLSTATKDTYDALHMQALPPR

SEQ ID NO: 284 - protein, 490 aa, Artificial Sequence
  source: /note="Description of Artificial Sequence: Synthetic polypeptide"
MALPVTALLLPLALLLHAARPQVQLVQSGAEVKKPGAPVKVSCKASGYTFTGYYMHWVRQAPGQGLEWMGWINPNSGGTNYAQKFQGRVTMTRDTSISTAYMELSRLRSDDTAVYYCARGEWDGSYYYDYWGQGTLVTVSSGGGGSGGGGSGGGGSGGGGSDIVLTQTPSSLSASVGDRVTITCRASQSINTYLNWYQHKPGKAPKLLIYAASSLQSGVPSRFSGSGSGTDFTLTISSLQPEDFATYYCQQSFSPLTFGGGTKLEIKTTTPAPRPPTPAPTIASQPLSLRPEACRPAAGGAVHTRGLDFACDIYIWAPLAGTCGVLLLSLVITLYCKRGRKKLLYIFKQPFMRPVQTTQEEDGCSCRFPEEEEGGCELRVKFSRSADAPAYKQGQNQLYNELNLGRREEYDVLDKRRGRDPEMGGKPRRKNPQEGLYNELQKDKMAEAYSEIGMKGERRRGKGHDGLYQGLSTATKDTYDALHMQALPPR

SEQ ID NO: 285 - protein, 486 aa, Artificial Sequence
  source: /note="Description of Artificial Sequence: Synthetic polypeptide"
MALPVTALLLPLALLLHAARPQVQLVESGGGLVQPGGSLRLSCAASGFTFSSYWMHWVRQVPGKGLVWVSRINTDGSTTTYADSVEGRFTISRDNAKNTLYLQMNSLRDDDTAVYYCVGGHWAVWGQGTTVTVSSGGGGSGGGGSGGGGSGGGGSDIQMTQSPSTLSASVGDRVTITCRASQSISDRLAWYQQKPGKAPKLLIYKASSLESGVPSRFSGSGSGTEFTLTISSLQPDDFAVYYCQQYGHLPMYTFGQGTKVEIKTTTPAPRPPTPAPTIASQPLSLRPEACRPAAGGAVHTRGLDFACDIYIWAPLAGTCGVLLLSLVITLYCKRGRKKLLYIFKQPFMRPVQTTQEEDGCSCRFPEEEEGGCELRVKFSRSADAPAYKQGQNQLYNELNLGRREEYDVLDKRRGRDPEMGGKPRRKNPQEGLYNELQKDKMAEAYSEIGMKGERRRGKGHDGLYQGLSTATKDTYDALHMQALPPR

SEQ ID NO: 286 - protein, 485 aa, Artificial Sequence
  source: /note="Description of Artificial Sequence: Synthetic polypeptide"
MALPVTALLLPLALLLHAARPQVQLVQSGAEVEKPGASVKVSCKASGYTFTDYYMHWVRQAPGQGLEWMGWINPNSGGTNYAQKFQGRVTMTRDTSISTAYMELSRLRSDDTAVYYCASGWDFDYWGQGTLVTVSSGGGGSGGGGSGGGGSGGGGSDIVMTQSPSSLSASVGDRVTITCRASQSIRYYLSWYQQKPGKAPKLLIYTASILQNGVPSRFSGSGSGTDFTLTISSLQPEDFATYYCLQTYTTPDFGPGTKVEIKTTTPAPRPPTPAPTIASQPLSLRPEACRPAAGGAVHTRGLDFACDIYIWAPLAGTCGVLLLSLVITLYCKRGRKKLLYIFKQPFMRPVQTTQEEDGCSCRFPEEEEGGCELRVKFSRSADAPAYKQGQNQLYNELNLGRREEYDVLDKRRGRDPEMGGKPRRKNPQEGLYNELQKDKMAEAYSEIGMKGERRRGKGHDGLYQGLSTATKDTYDALHMQALPPR

SEQ ID NO: 287 - protein, 497 aa, Artificial Sequence
  source: /note="Description of Artificial Sequence: Synthetic polypeptide"
MALPVTALLLPLALLLHAARPQVQLVQSGAEVKKPGASVKVSCKASGYTFTSYYMHWVRQAPGQGLEWMGIINPSGGSTSYAQKFQGRVTMTRDTSTSTVYMELSSLRSEDTAVYYCARYRLIAVAGDYYYYGMDVWGQGTMVTVSSGGGGSGGGGSGGGGSGGGGSDIQMTQSPSSVSASVGDRVTITCRASQGVGRWLAWYQQKPGTAPKLLIYAASTLQSGVPSRFSGSGSGTDFTLTINNLQPEDFATYYCQQANSFPLTFGGGTRLEIKTTTPAPRPPTPAPTIASQPLSLRPEACRPAAGGAVHTRGLDFACDIYIWAPLAGTCGVLLLSLVITLYCKRGRKKLLYIFKQPFMRPVQTTQEEDGCSCRFPEEEEGGCELRVKFSRSADAPAYKQGQNQLYNELNLGRREEYDVLDKRRGRDPEMGGKPRRKNPQEGLYNELQKDKMAEAYSEIGMKGERRRGKGHDGLYQGLSTATKDTYDALHMQALPPR

SEQ ID NO: 288 - protein, 494 aa, Artificial Sequence
  source: /note="Description of Artificial Sequence: Synthetic polypeptide"
MALPVTALLLPLALLLHAARPQVQLVQSGGGVVQPGRSLRLSCAASGFTFSSYAMHWVRQAPGKGLEWVAVISYDGSNKYYADSVKGRFTISRDNSKNTLYLQMNSLRAEDTAVYYCARWKVSSSSPAFDYWGQGTLVTVSSGGGGSGGGGSGGGGSGGGGSEIVLTQSPATLSLSPGERAILSCRASQSVYTKYLGWYQQKPGQAPRLLIYDASTRATGIPDRFSGSGSGTDFTLTINRLEPEDFAVYYCQHYGGSPLITFGQGTRLEIKTTTPAPRPPTPAPTIASQPLSLRPEACRPAAGGAVHTRGLDFACDIYIWAPLAGTCGVLLLSLVITLYCKRGRKKLLYIFKQPFMRPVQTTQEEDGCSCRFPEEEEGGCELRVKFSRSADAPAYKQGQNQLYNELNLGRREEYDVLDKRRGRDPEMGGKPRRKNPQEGLYNELQKDKMAEAYSEIGMKGERRRGKGHDGLYQGLSTATKDTYDALHMQALPPR

SEQ ID NO: 289 - protein, 490 aa, Artificial Sequence
  source: /note="Description of Artificial Sequence: Synthetic polypeptide"
MALPVTALLLPLALLLHAARPQVQLQQSGAEVKKPGASVKVSCKTSGYPFTGYSLHWVRQAPGQGLEWMGWINPNSGGTNYAQKFQGRVTMTRDTSISTAYMELSRLRSDDTAVYYCARDHYGGNSLFYWGQGTLVTVSSGGGGSGGGGSGGGGSGGGGSDIQLTQSPSSISASVGDTVSITCRASQDSGTWLAWYQQKPGKAPNLLMYDASTLEDGVPSRFSGSASGTEFTLTVNRLQPEDSATYYCQQYNSYPLTFGGGTKVDIKTTTPAPRPPTPAPTIASQPLSLRPEACRPAAGGAVHTRGLDFACDIYIWAPLAGTCGVLLLSLVITLYCKRGRKKLLYIFKQPFMRPVQTTQEEDGCSCRFPEEEEGGCELRVKFSRSADAPAYKQGQNQLYNELNLGRREEYDVLDKRRGRDPEMGGKPRRKNPQEGLYNELQKDKMAEAYSEIGMKGERRRGKGHDGLYQGLSTATKDTYDALHMQALPPR

SEQ ID NO: 290 - protein, 492 aa, Artificial Sequence
  source: /note="Description of Artificial Sequence: Synthetic polypeptide"
MALPVTALLLPLALLLHAARPQVQLVQSGAEVKKPGASVEVSCKASGYTFTSYYMHWVRQAPGQGLEWMGIINPSGGSTGYAQKFQGRVTMTRDTSTSTVHMELSSLRSEDTAVYYCARGGYSSSSDAFDIWGQGTMVTVSSGGGGSGGGGSGGGGSGGGGSDIQMTQSPPSLSASVGDRVTITCRASQDISSALAWYQQKPGTPPKLLIYDASSLESGVPSRFSGSGSGTDFTLTISSLQPEDFATYYCQQFSSYPLTFGGGTRLEIKTTTPAPRPPTPAPTIASQPLSLRPEACRPAAGGAVHTRGLDFACDIYIWAPLAGTCGVLLLSLVITLYCKRGRKKLLYIFKQPFMRPVQTTQEEDGCSCRFPEEEEGGCELRVKFSRSADAPAYKQGQNQLYNELNLGRREEYDVLDKRRGRDPEMGGKPRRKNPQEGLYNELQKDKMAEAYSEIGMKGERRRGKGHDGLYQGLSTATKDTYDALHMQALPPR

SEQ ID NO: 291 - protein, 499 aa, Artificial Sequence
  source: /note="Description of Artificial Sequence: Synthetic polypeptide"
MALPVTALLLPLALLLHAARPQVQLVQSGAEVKKPGASVKVSCKASGYTFTSYGISWVRQAPGQGLEWMGWISAYNGNTNYAQKLQGRVTMTTDTSTSTAYMELRSLRSDDTAVYYCARVAGGIYYYYGMDVWGQGTTITVSSGGGGSGGGGSGGGGSGGGGSDIVMTQTPDSLAVSLGERATISCKSSHSVLYNRNNKNYLAWYQQKPGQPPKLLFYWASTRKSGVPDRFSGSGSGTDFTLTISSLQPEDFATYFCQQTQTFPLTFGQGTRLEINTTTPAPRPPTPAPTIASQPLSLRPEACRPAAGGAVHTRGLDFACDIYIWAPLAGTCGVLLLSLVITLYCKRGRKKLLYIFKQPFMRPVQTTQEEDGCSCRFPEEEEGGCELRVKFSRSADAPAYKQGQNQLYNELNLGRREEYDVLDKRRGRDPEMGGKPRRKNPQEGLYNELQKDKMAEAYSEIGMKGERRRGKGHDGLYQGLSTATKDTYDALHMQALPPR

SEQ ID NO: 292 - protein, 485 aa, Artificial Sequence
  source: /note="Description of Artificial Sequence: Synthetic polypeptide"
MALPVTALLLPLALLLHAARPQVQLQQSGAEVKKPGASVKVSCKASGYTFTGYYMHWVRQAPGQGLEWMGWINPNSGGTNYAQNFQGRVTMTRDTSISTAYMELRRLRSDDTAVYYCASGWDFDYWGQGTLVTVSSGGGGSGGGGSGGGGSGGGGSDIRMTQSPSSLSASVGDRVTITCRASQSIRYYLSWYQQKPGKAPKLLIYTASILQNGVPSRFSGSGSGTDFTLTISSLQPEDFATYYCLQTYTTPDFGPGTKVEIKTTTPAPRPPTPAPTIASQPLSLRPEACRPAAGGAVHTRGLDFACDIYIWAPLAGTCGVLLLSLVITLYCKRGRKKLLYIFKQPFMRPVQTTQEEDGCSCRFPEEEEGGCELRVKFSRSADAPAYKQGQNQLYNELNLGRREEYDVLDKRRGRDPEMGGKPRRKNPQEGLYNELQKDKMAEAYSEIGMKGERRRGKGHDGLYQGLSTATKDTYDALHMQALPPR

SEQ ID NO: 293 - protein, 490 aa, Artificial Sequence
  source: /note="Description of Artificial Sequence: Synthetic polypeptide"
MALPVTALLLPLALLLHAARPQVQLVQSGAEVKKPGASVKVSCKASGYTFTGYYMHWVRQAPGQGLEWMGRINPNSGGTNYAQKFQGRVTMTTDTSTSTAYMELRSLRSDDTAVYYCARTTTSYAFDIWGQGTMVTVSSGGGGSGGGGSGGGGSGGGGSDIQLTQSPSTLSASVGDRVTITCRASQSISTWLAWYQQKPGKAPNLLIYKASTLESGVPSRFSGSGSGTEFTLTISSLQPDDFATYYCQQYNTYSPYTFGQGTKLEIKTTTPAPRPPTPAPTIASQPLSLRPEACRPAAGGAVHTRGLDFACDIYIWAPLAGTCGVLLLSLVITLYCKRGRKKLLYIFKQPFMRPVQTTQEEDGCSCRFPEEEEGGCELRVKFSRSADAPAYKQGQNQLYNELNLGRREEYDVLDKRRGRDPEMGGKPRRKNPQEGLYNELQKDKMAEAYSEIGMKGERRRGKGHDGLYQGLSTATKDTYDALHMQALPPR

SEQ ID NO: 294 - protein, 493 aa, Artificial Sequence
  source: /note="Description of Artificial Sequence: Synthetic polypeptide"
MALPVTALLLPLALLLHAARPQVQLVQSGGGLVKPGGSLRLSCEASGFIFSDYYMGWIRQAPGKGLEWVSYIGRSGSSMYYADSVKGRFTFSRDNAKNSLYLQMNSLRAEDTAVYYCAASPVVAATEDFQHWGQGTLVTVSSGGGGSGGGGSGGGGSGGGGSDIVMTQTPATLSLSPGERATLSCRASQSVTSNYLAWYQQKPGQAPRLLLFGASTRATGIPDRFSGSGSGTDFTLTINRLEPEDFAMYYCQQYGSAPVTFGQGTKLEIKTTTPAPRPPTPAPTIASQPLSLRPEACRPAAGGAVHTRGLDFACDIYIWAPLAGTCGVLLLSLVITLYCKRGRKKLLYIFKQPFMRPVQTTQEEDGCSCRFPEEEEGGCELRVKFSRSADAPAYKQGQNQLYNELNLGRREEYDVLDKRRGRDPEMGGKPRRKNPQEGLYNELQKDKMAEAYSEIGMKGERRRGKGHDGLYQGLSTATKDTYDALHMQALPPR

SEQ ID NO: 295 - protein, 493 aa, Artificial Sequence
  source: /note="Description of Artificial Sequence: Synthetic polypeptide"
MALPVTALLLPLALLLHAARPQVQLVQSGAEVRAPGASVKISCKASGFTFRGYYIHWVRQAPGQGLEWMGIINPSGGSRAYAQKFQGRVTMTRDTSTSTVYMELSSLRSDDTAMYYCARTASCGGDCYYLDYWGQGTLVTVSSGGGGSGGGGSGGGGSGGGGSDIQMTQSPPTLSASVGDRVTITCRASENVNIWLAWYQQKPGKAPKLLIYKSSSLASGVPSRFSGSGSGAEFTLTISSLQPDDFATYYCQQYQSYPLTFGGGTKVDIKTTTPAPRPPTPAPTIASQPLSLRPEACRPAAGGAVHTRGLDFACDIYIWAPLAGTCGVLLLSLVITLYCKRGRKKLLYIFKQPFMRPVQTTQEEDGCSCRFPEEEEGGCELRVKFSRSADAPAYKQGQNQLYNELNLGRREEYDVLDKRRGRDPEMGGKPRRKNPQEGLYNELQKDKMAEAYSEIGMKGERRRGKGHDGLYQGLSTATKDTYDALHMQALPPR

SEQ ID NO: 296 - protein, 488 aa, Artificial Sequence
  source: /note="Description of Artificial Sequence: Synthetic polypeptide"
MALPVTALLLPLALLLHAARPQVQLVQSGGGLVQPGRSLRLSCAASGFTFDDYAMHWVRQAPGKGLEWVSGISWNSGSIGYADSVKGRFTISRDNAKNSLYLQMNSLRAEDTAVYYCAKDGSSSWSWGYFDYWGQGTLVTVSSGGGGSGGGGSGGGGSSSELTQDPAVSVALGQTVRTTCQGDALRSYYASWYQQKPGQAPMLVIYGKNNRPSGIPDRFSGSDSGDTASLTITGAQAEDEADYYCNSRDSSGYPVFGTGTKVTVLTTTPAPRPPTPAPTIASQPLSLRPEACRPAAGGAVHTRGLDFACDIYIWAPLAGTCGVLLLSLVITLYCKRGRKKLLYIFKQPFMRPVQTTQEEDGCSCRFPEEEEGGCELRVKFSRSADAPAYKQGQNQLYNELNLGRREEYDVLDKRRGRDPEMGGKPRRKNPQEGLYNELQKDKMAEAYSEIGMKGERRRGKGHDGLYQGLSTATKDTYDALHMQALPPR

SEQ ID NO: 297 - protein, 490 aa, Artificial Sequence
  source: /note="Description of Artificial Sequence: Synthetic polypeptide"
MALPVTALLLPLALLLHAARPEVQLVESGGGLVQPGRSLRLSCAASGFTFDDYAMHWVRQAPGKGLEWVSGISWNSGSTGYADSVKGRFTISRDNAKNSLYLQMNSLRAEDTALYYCAKDSSSWYGGGSAFDIWGQGTMVTVSSGGGGSGGGGSGGGGSSSELTQEPAVSVALGQTVRITCQGDSLRSYYASWYQQKPGQAPVLVIFGRSRRPSGIPDRFSGSSSGNTASLIITGAQAEDEADYYCNSRDNTANHYVFGTGTKLTVLTTTPAPRPPTPAPTIASQPLSLRPEACRPAAGGAVHTRGLDFACDIYIWAPLAGTCGVLLLSLVITLYCKRGRKKLLYIFKQPFMRPVQTTQEEDGCSCRFPEEEEGGCELRVKFSRSADAPAYKQGQNQLYNELNLGRREEYDVLDKRRGRDPEMGGKPRRKNPQEGLYNELQKDKMAEAYSEIGMKGERRRGKGHDGLYQGLSTATKDTYDALHMQALPPR

SEQ ID NO: 298 - protein, 490 aa, Artificial Sequence
  source: /note="Description of Artificial Sequence: Synthetic polypeptide"
MALPVTALLLPLALLLHAARPEVQLVESGGGLVQPGRSLRLSCAASGFTFDDYAMHWVRQAPGKGLEWVSGISWNSGSTGYADSVKGRFTISRDNAKNSLYLQMNSLRAEDTALYYCAKDSSSWYGGGSAFDIWGQGTMVTVSSGGGGSGGGGSGGGGSSSELTQDPAVSVALGQTVRITCQGDSLRSYYASWYQQKPGQAPVLVIYGKNNRPSGIPDRFSGSSSGNTASLTITGAQAEDEADYYCNSRGSSGNHYVFGTGTKVTVLTTTPAPRPPTPAPTIASQPLSLRPEACRPAAGGAVHTRGLDFACDIYIWAPLAGTCGVLLLSLVITLYCKRGRKKLLYIFKQPFMRPVQTTQEEDGCSCRFPEEEEGGCELRVKFSRSADAPAYKQGQNQLYNELNLGRREEYDVLDKRRGRDPEMGGKPRRKNPQEGLYNELQKDKMAEAYSEIGMKGERRRGKGHDGLYQGLSTATKDTYDALHMQALPPR

SEQ ID NO: 299 - protein, 495 aa, Artificial Sequence
  source: /note="Description of Artificial Sequence: Synthetic polypeptide"
MALPVTALLLPLALLLHAARPQVQLVQSGGGLVQPGGSLRLSCAASGFTFSSYWMHWVRQAPGKGLVWVSRINSDGSSTSYADSVKGRFTISRDNAKNTLYLQMNSLRAEDTAVYYCVRTGWVGSYYYYMDVWGKGTTVTVSSGGGGSGGGGSGGGGSGGGGSEIVLTQSPGTLSLSPGERATLSCRASQSVSSNYLAWYQQKPGQPPRLLIYDVSTRATGIPARFSGGGSGTDFTLTISSLEPEDFAVYYCQQRSNWPPWTFGQGTKVEIKTTTPAPRPPTPAPTIASQPLSLRPEACRPAAGGAVHTRGLDFACDIYIWAPLAGTCGVLLLSLVITLYCKRGRKKLLYIFKQPFMRPVQTTQEEDGCSCRFPEEEEGGCELRVKFSRSADAPAYKQGQNQLYNELNLGRREEYDVLDKRRGRDPEMGGKPRRKNPQEGLYNELQKDKMAEAYSEIGMKGERRRGKGHDGLYQGLSTATKDTYDALHMQALPPR

SEQ ID NO: 300 - protein, 494 aa, Artificial Sequence
  source: /note="Description of Artificial Sequence: Synthetic polypeptide"
MALPVTALLLPLALLLHAARPQVQLVQSGGGVVQPGRSLRLSCAASGFTFSSYGMHWVRQAPGKGLEWVAVISYDGSNKYYADSVKGRFTISRDNSKNTLYLQMNSLRAEDTAVYYCAKGYSRYYYYGMDVWGQGTTVTVSSGGGGSGGGGSGGGGSGGGGSEIVMTQSPATLSLSPGERAILSCRASQSVYTKYLGWYQQKPGQAPRLLIYDASTRATGIPDRFSGSGSGTDFTLTINRLEPEDFAVYYCQHYGGSPLITFGQGTKVDIKTTTPAPRPPTPAPTIASQPLSLRPEACRPAAGGAVHTRGLDFACDIYIWAPLAGTCGVLLLSLVITLYCKRGRKKLLYIFKQPFMRPVQTTQEEDGCSCRFPEEEEGGCELRVKFSRSADAPAYKQGQNQLYNELNLGRREEYDVLDKRRGRDPEMGGKPRRKNPQEGLYNELQKDKMAEAYSEIGMKGERRRGKGHDGLYQGLSTATKDTYDALHMQALPPR

SEQ ID NO: 301 - protein, 493 aa, Artificial Sequence
  source: /note="Description of Artificial Sequence: Synthetic polypeptide"
MALPVTALLLPLALLLHAARPQVQLVQSGGGLVQPGGSLRLSCAASGFTFSSYAMSWVRQAPGKGLEWVSAISGSGGSTYYADSVKGRFTISRDNSKNTLYLQMNSLRAEDTAVYYCAKREAAAGHDWYFDLWGRGTLVTVSSGGGGSGGGGSGGGGSGGGGSDIRVTQSPSSLSASVGDRVTITCRASQSISSYLNWYQQKPGKAPKLLIYAASSLQSGVPSRFSGSGSGTDFTLTISSLQPEDFATYYCQQSYSIPLTFGQGTKVEIKTTTPAPRPPTPAPTIASQPLSLRPEACRPAAGGAVHTRGLDFACDIYIWAPLAGTCGVLLLSLVITLYCKRGRKKLLYIFKQPFMRPVQTTQEEDGCSCRFPEEEEGGCELRVKFSRSADAPAYKQGQNQLYNELNLGRREEYDVLDKRRGRDPEMGGKPRRKNPQEGLYNELQKDKMAEAYSEIGMKGERRRGKGHDGLYQGLSTATKDTYDALHMQALPPR

SEQ ID NO: 302 - protein, 491 aa, Artificial Sequence
  source: /note="Description of Artificial Sequence: Synthetic polypeptide"
MALPVTALLLPLALLLHAARPQVQLVQSWAEVKKPGASVKVSCKASGYTFTSYYMHWVRQAPGQGLEWMGIINPSGGSTSYAQKFQGRVTMTRDTSTSTVYMELSNLRSEDTAVYYCARSPRVTTGYFDYWGQGTLVTVSSGGGGSGGGGSGGGGSGGGGSDIQLTQSPSTLSASVGDRVTITCRASQSISSWLAWYQQKPGKAPKLLIYKASSLESGVPSRFSGSGSGTEFTLTISSLQPDDFATYYCQQYSSYPLTFGGGTRLEIKTTTPAPRPPTPAPTIASQPLSLRPEACRPAAGGAVHTRGLDFACDIYIWAPLAGTCGVLLLSLVITLYCKRGRKKLLYIFKQPFMRPVQTTQEEDGCSCRFPEEEEGGCELRVKFSRSADAPAYKQGQNQLYNELNLGRREEYDVLDKRRGRDPEMGGKPRRKNPQEGLYNELQKDKMAEAYSEIGMKGERRRGKGHDGLYQGLSTATKDTYDALHMQALPPR

SEQ ID NO: 303 - protein, 497 aa, Artificial Sequence
  source: /note="Description of Artificial Sequence: Synthetic polypeptide"
MALPVTALLLPLALLLHAARPQVQLVQSGAEVRRPGASVKISCRASGDTSTRHYIHWLRQAPGQGPEWMGVINPTTGPATGSPAYAQMLQGRVTMTRDTSTRTVYMELRSLRFEDTAVYYCARSVVGRSAPYYFDYWGQGTLVTVSSGGGGSGGGGSGGGGSGGGGSDIQMTQSPSSLSASVGDRVTITCRASQGISDYSAWYQQKPGKAPKLLIYAASTLQSGVPSRFSGSGSGTDFTLTISYLQSEDFATYYCQQYYSYPLTFGGGTKVDIKTTTPAPRPPTPAPTIASQPLSLRPEACRPAAGGAVHTRGLDFACDIYIWAPLAGTCGVLLLSLVITLYCKRGRKKLLYIFKQPFMRPVQTTQEEDGCSCRFPEEEEGGCELRVKFSRSADAPAYKQGQNQLYNELNLGRREEYDVLDKRRGRDPEMGGKPRRKNPQEGLYNELQKDKMAEAYSEIGMKGERRRGKGHDGLYQGLSTATKDTYDALHMQALPPR

SEQ ID NO: 304 - protein, 493 aa, Artificial Sequence
  source: /note="Description of Artificial Sequence: Synthetic polypeptide"
MALPVTALLLPLALLLHAARPQVQLQQSGAEVKKPGASVKVSCKASGYTFTNYYMHWVRQAPGQGLEWMGIINPSGGYTTYAQKFQGRLTMTRDTSTSTVYMELSSLRSEDTAVYYCARIRSCGGDCYYFDNWGQGTLVTVSSGGGGSGGGGSGGGGSGGGGSDIQLTQSPSTLSASVGDRVTITCRASENVNIWLAWYQQKPGKAPKLLIYKSSSLASGVPSRFSGSGSGAEFTLTISSLQPDDFATYYCQQYQSYPLTFGGGTKVDIKTTTPAPRPPTPAPTIASQPLSLRPEACRPAAGGAVHTRGLDFACDIYIWAPLAGTCGVLLLSLVITLYCKRGRKKLLYIFKQPFMRPVQTTQEEDGCSCRFPEEEEGGCELRVKFSRSADAPAYKQGQNQLYNELNLGRREEYDVLDKRRGRDPEMGGKPRRKNPQEGLYNELQKDKMAEAYSEIGMKGERRRGKGHDGLYQGLSTATKDTYDALHMQALPPR

SEQ ID NO: 305 - protein, 490 aa, Artificial Sequence
  source: /note="Description of Artificial Sequence: Synthetic polypeptide"
MALPVTALLLPLALLLHAARPQITLKESGPALVKPTQTLTLTCTFSGFSLSTAGVHVGWIRQPPGKALEWLALISWADDKRYRPSLRSRLDITRVTSKDQVVLSMTNMQPEDTATYYCALQGFDGYEANWGPGTLVTVSSGGGGSGGGGSGGGGSGGGGSDIVMTQSPSSLSASAGDRVTITCRASRGISSALAWYQQKPGKPPKLLIYDASSLESGVPSRFSGSGSGTDFTLTIDSLEPEDFATYYCQQSYSTPWTFGQGTKVDIKTTTPAPRPPTPAPTIASQPLSLRPEACRPAAGGAVHTRGLDFACDIYIWAPLAGTCGVLLLSLVITLYCKRGRKKLLYIFKQPFMRPVQTTQEEDGCSCRFPEEEEGGCELRVKFSRSADAPAYKQGQNQLYNELNLGRREEYDVLDKRRGRDPEMGGKPRRKNPQEGLYNELQKDKMAEAYSEIGMKGERRRGKGHDGLYQGLSTATKDTYDALHMQALPPR

SEQ ID NO: 306 - protein, 383 aa, Artificial Sequence
  source: /note="Description of Artificial Sequence: Synthetic polypeptide"
MALPVTALLLPLALLLHAARPQVQLQQSGPELEKPGASVKISCKASGYSFTGYTMNWVKQSHGKSLEWIGLITPYNGASSYNQKFRGKATLTVDKSSSTAYMDLLSLTSEDSAVYFCARGGYDGRGFDYWGQGTTVTVSSGGGGSGGGGSGGGGSDIELTQSPAIMSASPGEKVTMTCSASSSVSYMHWYQQKSGTSPKRWIYDTSKLASGVPGRFSGSGSGNSYSLTISSVEAEDDATYYCQQWSGYPLTFGAGTKLEITTTPAPRPPTPAPTIASQPLSLRPEACRPAAGGAVHTRGLDFACDIYIWAPLAGTCGVLLLSLVITLYCKRGRKKLLYIFKQPFMRPVQTTQEEDGCSCRFPEEEEGGCELRVKFSRSADAPA

SEQ ID NO: 307 - DNA, 63 bp, Artificial Sequence
  source: /note="Description of Artificial Sequence: Synthetic oligonucleotide"
atggccctccctgtcaccgccctgctgcttccgctggctcttctgctccacgccgctcggccc

SEQ ID NO: 308 - DNA, 72 bp, Artificial Sequence
  source: /note="Description of Artificial Sequence: Synthetic oligonucleotide"
atctacatttgggcccctctggctggtacttgcggggtcctgctgctttcactcgtgatcactctttactgt

SEQ ID NO: 309 - DNA, 126 bp, Artificial Sequence
  source: /note="Description of Artificial Sequence: Synthetic polynucleotide"
aagcgcggtcggaagaagctgctgtacatctttaagcaacccttcatgaggcctgtgcagactactcaagaggaggacggctgttcatgccggttcccagaggaggaggaaggcggctgcgaactg

SEQ ID NO: 310 - DNA, 336 bp, Artificial Sequence
  source: /note="Description of Artificial Sequence: Synthetic polynucleotide"
cgcgtgaaattcagccgcagcgcagatgctccagcctacaagcaggggcagaaccagctctacaacgaactcaatcttggtcggagagaggagtacgacgtgctggacaagcggagaggacgggacccagaaatgggcgggaagccgcgcagaaagaatccccaagagggcctgtacaacgagctccaaaaggataagatggcagaagcctatagcgagattggtatgaaaggggaacgcagaagaggcaaaggccacgacggactgtaccagggactcagcaccgccaccaaggacacctatgacgctcttcacatgcaggccctgccgcctcgg

SEQ ID NO: 311-338 - skipped (28 entries)

SEQ ID NO: 339 - protein, 246 aa, Artificial Sequence
  source: /note="Description of Artificial Sequence: Synthetic polypeptide"
QVQLVESGGGLVQPGRSLRLSCAASGFTFSNYAMSWVRQAPGKGLGWVSGISRSGENTYYADSVKGRFTISRDNSKNTLYLQMNSLRDEDTAVYYCARSPAHYYGGMDVWGQGTTVTVSSASGGGGSGGRASGGGGSDIVLTQSPGTLSLSPGERATLSCRASQSISSSFLAWYQQKPGQAPRLLIYGASRRATGIPDRFSGSGSGTDFTLTISRLEPEDSAVYYCQQYHSSPSWTFGQGTKLEIK

SEQ ID NO: 340 - protein, 244 aa, Artificial Sequence
  source: /note="Description of Artificial Sequence: Synthetic polypeptide"
QVQLVESGGGLVQPGRSLRLSCAASGFTFDDYAMHWVRQAPGKGLEWVSGISWNSGSIGYADSVKGRFTISRDNAKNSLYLQMNSLRAEDTALYYCSVHSFLAYWGQGTLVTVSSASGGGGSGGRASGGGGSDIVMTQTPLSLPVTPGEPASISCRSSQSLLHSNGYNYLDWYLQKPGQSPQLLIYLGSNRASGVPDRFSGSGSGTDFTLKISRVEAEDVGVYYCMQALQTPYTFGQGTKVEIK

SEQ ID NO: 341 - protein, 243 aa, Artificial Sequence
  source: /note="Description of Artificial Sequence: Synthetic polypeptide"
EVQLLESGGGLVQPGGSLRLSCAVSGFALSNHGMSWVRRAPGKGLEWVSGIVYSGSTYYAASVKGRFTISRDNSRNTLYLQMNSLRPEDTAIYYCSAHGGESDVWGQGTTVTVSSASGGGGSGGRASGGGGSDIVMTQTPLSLSVTPGQPASISCKSSQSLLRNDGKTPLYWYLQKAGQPPQLLIYEVSNRFSGVPDRFSGSGSGTDFTLKISRVEAEDVGAYYCMQNIQFPSFGGGTKLEIK

SEQ ID NO: 342 - protein, 249 aa, Artificial Sequence
  source: /note="Description of Artificial Sequence: Synthetic polypeptide"
QVQLVQSGAEVRKTGASVKVSCKASGYIFDNFGINWVRQAPGQGLEWMGWINPKNNNTNYAQKFQGRVTITADESTNTAYMEVSSLRSEDTAVYYCARGPYYYQSYMDVWGQGTMVTVSSASGGGGSGGRASGGGGSDIVMTQTPLSLPVTPGEPASISCRSSQSLLHSNGYNYLNWYLQKPGQSPQLLIYLGSKRASGVPDRFSGSGSGTDFTLHITRVGAEDVGVYYCMQALQTPYTFGQGTKLEIK

SEQ ID NO: 343 - protein, 246 aa, Artificial Sequence
  source: /note="Description of Artificial Sequence: Synthetic polypeptide"
QVQLQESGGGLVQPGGSLRLSCAASGFTFSSDAMTWVRQAPGKGLEWVSVISGSGGTTYYADSVKGRFTISRDNSKNTLYLQMNSLRAEDTAVYYCAKLDSSGYYYARGPRYWGQGTLVTVSSASGGGGSGGRASGGGGSDIQLTQSPSSLSASVGDRVTITCRASQSISSYLNWYQQKPGKAPKLLIYGASTLASGVPARFSGSGSGTHFTLTINSLQSEDSATYYCQQSYKRASFGQGTKVEIK

SEQ ID NO: 344 - protein, 247 aa, Artificial Sequence
  source: /note="Description of Artificial Sequence: Synthetic polypeptide"
QVQLVQSGAEVKKPGASVKVSCKASGYTFSNYGITWVRQAPGQGLEWMGWISAYNGNTNYAQKFQGRVTMTRNTSISTAYMELSSLRSEDTAVYYCARGPYYYYMDVWGKGTMVTVSSASGGGGSGGRASGGGGSEIVMTQSPLSLPVTPGEPASISCRSSQSLLYSNGYNYVDWYLQKPGQSPQLLIYLGSNRASGVPDRFSGSGSGTDFKLQISRVEAEDVGIYYCMQGRQFPYSFGQGTKVEIK

SEQ ID NO: 345 - protein, 238 aa, Artificial Sequence
  source: /note="Description of Artificial Sequence: Synthetic polypeptide"
EVQLLETGGGLVQPGGSLRLSCAVSGFALSNHGMSWVRRAPGKGLEWVSGIVYSGSTYYAASVKGRFTISRDNSRNTLYLQMNSLRPEDTAIYYCSAHGGESDVWGQGTTVTVSSASGGGGSGGRASGGGGSEIVLTQSPATLSVSPGESATLSCRASQSVSSNLAWYQQKPGQAPRLLIYGASTRASGIPDRFSGSGSGTDFTLTISSLQAEDVAVYYCQQYGSSLTFGGGTKVEIK

SEQ ID NO: 346 - protein, 239 aa, Artificial Sequence
  source: /note="Description of Artificial Sequence: Synthetic polypeptide"
EVQLVETGGGLVQPGGSLRLSCAVSGFALSNHGMSWVRRAPGKGLEWVSGIVYSGSTYYAASVKGRFTISRDNSRNTLYLQMNSLRPEDTAIYYCSAHGGESDVWGQGTTVTVSSASGGGGSGGRASGGGGSEIVMTQSPATLSVSPGERATLSCRASQSVSSKLAWYQQKPGQAPRLLMYGASIRATGIPDRFSGSGSGTEFTLTISSLEPEDFAVYYCQQYGSSSWTFGQGTKVEIK

SEQ ID NO: 347 - protein, 241 aa, Artificial Sequence
  source: /note="Description of Artificial Sequence: Synthetic polypeptide"
EVQLVETGGGVVQPGGSLRLSCAVSGFALSNHGMSWVRRAPGKGLEWVSGIVYSGSTYYAASVKGRFTISRDNSRNTLYLQMNSLRPEDTAIYYCSAHGGESDVWGQGTTVTVSSASGGGGSGGRASGGGGSEIVLTQSPGTLSLSPGERATLSCRASQSVGSTNLAWYQQKPGQAPRLLIYDASNRATGIPDRFSGGGSGTDFTLTISRLEPEDFAVYYCQQYGSSPPWTFGQGTKVEIK

SEQ ID NO: 348 - protein, 239 aa, Artificial Sequence
  source: /note="Description of Artificial Sequence: Synthetic polypeptide"
QVQLVESGGGLVKPGGSLRLSCAASGFTFSDYYMSWIRQAPGKGLEWVSYISSSGSTIYYADSVKGRFTISRDNAKNSLYLQMNSLRAEDTAVYYCARESGDGMDVWGQGTTVTVSSASGGGGSGGRASGGGGSDIQMTQSPSSLSASVGDRVTITCRASQSISSYLNWYQQKPGKAPKLLIYAASSLQSGVPSRFSGSGSGTDFTLTISSLQPEDFATYYCQQSYTLAFGQGTKVDIK

SEQ ID NO: 349 - protein, 239 aa, Artificial Sequence
  source: /note="Description of Artificial Sequence: Synthetic polypeptide"
EVQLVESGGGLVQPGGSLRLSCAVSGFALSNHGMSWVRRAPGKGLEWVSGIVYSGSTYYAASVKGRFTISRDNSRNTLYLQMNSLRPEDTAIYYCSAHGGESDVWGQGTTVTVSSASGGGGSGGRASGGGGSDIQLTQSPSSLSASVGDRVTITCRASQSISSYLNWYQQKPGKAPKLLIYAASSLQSGVPSRFSGSGSGTDFTLTISSLQPEDFATYYCQQSYSTPYTFGQGTKVEIK

SEQ ID NO: 350 - protein, 246 aa, Artificial Sequence
  source: /note="Description of Artificial Sequence: Synthetic polypeptide"
QVQLVQSGGGLVKPGGSLRLSCAASGFTFSDYYMSWIRQAPGKGLEWVSYISSSGNTIYYADSVKGRFTISRDNAKNSLYLQMNSLRAEDTAVYYCARSTMVREDYWGQGTLVTVSSASGGGGSGGRASGGGGSDIVLTQSPLSLPVTLGQPASISCKSSESLVHNSGKTYLNWFHQRPGQSPRRLIYEVSNRDSGVPDRFTGSGSGTDFTLKISRVEAEDVGVYYCMQGTHWPGTFGQGTKLEIK

SEQ ID NO: 351 - protein, 239 aa, Artificial Sequence
  source: /note="Description of Artificial Sequence: Synthetic polypeptide"
QVQLVESGGGLVQPGGSLRLSCAVSGFALSNHGMSWVRRAPGKGLEWVSGIVYSGSTYYAASVKGRFTISRDNSRNTLYLQMNSLRPEDTAIYYCSAHGGESDVWGQGTTVTVSSASGGGGSGGRASGGGGSDIRLTQSPSPLSASVGDRVTITCQASEDINKFLNWYHQTPGKAPKLLIYDASTLQTGVPSRFSGSGSGTDFTLTINSLQPEDIGTYYCQQYESLPLTFGGGTKVEIK

SEQ ID NO: 352 - protein, 240 aa, Artificial Sequence
  source: /note="Description of Artificial Sequence: Synthetic polypeptide"
EVQLVETGGGLVQPGGSLRLSCAVSGFALSNHGMSWVRRAPGKGLEWVSGIVYSGSTYYAASVKGRFTISRDNSRNTLYLQMNSLRPEDTAIYYCSAHGGESDVWGQGTTVTVSSASGGGGSGGRASGGGGSETTLTQSPATLSVSPGERATLSCRASQSVGSNLAWYQQKPGQGPRLLIYGASTRATGIPARFSGSGSGTEFTLTISSLQPEDFAVYYCQQYNDWLPVTFGQGTKVEIK

SEQ ID NO: 353 - protein, 241 aa, Artificial Sequence
  source: /note="Description of Artificial Sequence: Synthetic polypeptide"
EVQLVESGGGLVQPGGSLRLSCAVSGFALSNHGMSWVRRAPGKGLEWVSGIVYSGSTYYAASVKGRFTISRDNSRNTLYLQMNSLRPEDTAIYYCSAHGGESDVWGQGTTVTVSSASGGGGSGGRASGGGGSEIVLTQSPGTLSLSPGERATLSCRASQSIGSSSLAWYQQKPGQAPRLLMYGASSRASGIPDRFSGSGSGTDFTLTISRLEPEDFAVYYCQQYAGSPPFTFGQGTKVEIK

SEQ ID NO: 354 - DNA, 738 bp, Artificial Sequence
  source: /note="Description of Artificial Sequence: Synthetic polynucleotide"
caagtgcaactcgtggaatctggtggaggactcgtgcaacccggaagatcgcttagactgtcgtgtgccgccagcgggttcactttctcgaactacgcgatgtcctgggtccgccaggcacccggaaagggactcggttgggtgtccggcatttcccggtccggcgaaaatacctactacgccgactccgtgaagggccgcttcaccatctcaagggacaacagcaaaaacaccctgtacttgcaaatgaactccctgcgggatgaagatacagccgtgtactattgcgcccggtcgcctgcccattactacggcggaatggacgtctggggacagggaaccactgtgactgtcagcagcgcgtcgggtggcggcggctcagggggtcgggcctccggggggggagggtccgacatcgtgctgacccagtccccgggaaccctgagcctgagcccgggagagcgcgcgaccctgtcatgccgggcatcccagagcattagctcctcctttctcgcctggtatcagcagaagcccggacaggccccgaggctgctgatctacggcgctagcagaagggctaccggaatcccagaccggttctccggctccggttccgggaccgatttcacccttactatctcgcgcctggaacctgaggactccgccgtctactactgccagcagtaccactcatccccgtcgtggacgttcggacagggcaccaagctggagattaag

SEQ ID NO: 355 - DNA, 732 bp, Artificial Sequence
  source: /note="Description of Artificial Sequence: Synthetic polynucleotide"
caagtgcaactcgtcgaatccggtggaggtctggtccaacctggtagaagcctgagactgtcgtgtgcggccagcggattcacctttgatgactatgctatgcactgggtgcggcaggccccaggaaagggcctggaatgggtgtcgggaattagctggaactccgggtccattggctacgccgactccgtgaagggccgcttcaccatctcccgcgacaacgcaaagaactccctgtacttgcaaatgaactcgctcagggctgaggataccgcgctgtactactgctccgtgcattccttcctggcctactggggacagggaactctggtcaccgtgtcgagcgcctccggcggcgggggctcgggtggacgggcctcgggcggaggggggtccgacatcgtgatgacccagaccccgctgagcttgcccgtgactcccggagagcctgcatccatctcctgccggtcatcccagtcccttctccactccaacggatacaactacctcgactggtacctccagaagccgggacagagccctcagcttctgatctacctggggtcaaatagagcctcaggagtgccggatcggttcagcggatctggttcgggaactgatttcactctgaagatttcccgcgtggaagccgaggacgtgggcgtctactactgtatgcaggcgctgcagaccccctataccttcggccaagggacgaaagtggagatcaag

SEQ ID NO: 356 - DNA, 729 bp, Artificial Sequence
  source: /note="Description of Artificial Sequence: Synthetic polynucleotide"
gaagtgcaattgttggaatctggaggaggacttgtgcagcctggaggatcactgagactttcgtgtgcggtgtcaggcttcgccctgagcaaccacggcatgagctgggtgcggagagccccggggaagggtctggaatgggtgtccgggatcgtctactccggttcaacttactacgccgcaagcgtgaagggtcgcttcaccatttcccgcgataactcccggaacaccctgtacctccaaatgaactccctgcggcccgaggacaccgccatctactactgttccgcgcatggaggagagtccgatgtctggggacagggcactaccgtgaccgtgtcgagcgcctcggggggaggaggctccggcggtcgcgcctccggggggggtggcagcgacattgtgatgacgcagactccactctcgctgtccgtgaccccgggacagcccgcgtccatctcgtgcaagagctcccagagcctgctgaggaacgacggaaagactcctctgtattggtacctccagaaggctggacagcccccgcaactgctcatctacgaagtgtcaaatcgcttctccggggtgccggatcggttttccggctcgggatcgggcaccgacttcaccctgaaaatctccagggtcgaggccgaggacgtgggagcctactactgcatgcaaaacatccagttcccttccttcggcggcggcacaaagctggagattaag

SEQ ID NO: 357 - DNA, 747 bp, Artificial Sequence
  source: /note="Description of Artificial Sequence: Synthetic polynucleotide"
caagtccaactcgtccagtccggcgcagaagtcagaaaaaccggtgctagcgtgaaagtgtcctgcaaggcctccggctacattttcgataacttcggaatcaactgggtcagacaggccccgggccaggggctggaatggatgggatggatcaaccccaagaacaacaacaccaactacgcacagaagttccagggccgcgtgactatcaccgccgatgaatcgaccaataccgcctacatggaggtgtcctccctgcggtcggaggacactgccgtgtattactgcgcgaggggcccatactactaccaaagctacatggacgtctggggacagggaaccatggtgaccgtgtcatccgcctccggtggtggaggctccggggggcgggcttcaggaggcggaggaagcgatattgtgatgacccagactccgcttagcctgcccgtgactcctggagaaccggcctccatttcctgccggtcctcgcaatcactcctgcattccaacggttacaactacctgaattggtacctccagaagcctggccagtcgccccagttgctgatctatctgggctcgaagcgcgcctccggggtgcctgaccggtttagcggatctgggagcggcacggacttcactctccacatcacccgcgtgggagcggaggacgtgggagtgtactactgtatgcaggcgctgcagactccgtacacattcggacagggcaccaagctggagatcaag

SEQ ID NO: 358 - DNA, 738 bp, Artificial Sequence
  source: /note="Description of Artificial Sequence: Synthetic polynucleotide"
caagtgcaacttcaagaatcaggcggaggactcgtgcagcccggaggatcattgcggctctcgtgcgccgcctcgggcttcaccttctcgagcgacgccatgacctgggtccgccaggccccggggaaggggctggaatgggtgtctgtgatttccggctccgggggaactacgtactacgccgattccgtgaaaggtcgcttcactatctcccgggacaacagcaagaacaccctttatctgcaaatgaattccctccgcgccgaggacaccgccgtgtactactgcgccaagctggactcctcgggctactactatgcccggggtccgagatactggggacagggaaccctcgtgaccgtgtcctccgcgtccggcggaggagggtcgggagggcgggcctccggcggcggcggttcggacatccagctgacccagtccccatcctcactgagcgcaagcgtgggcgacagagtcaccattacatgcagggcgtcccagagcatcagctcctacctgaactggtaccaacagaagcctggaaaggctcctaagctgttgatctacggggcttcgaccctggcatccggggtgcccgcgaggtttagcggaagcggtagcggcactcacttcactctgaccattaacagcctccagtccgaggattcagccacttactactgtcagcagtcctacaagcgggccagcttcggacagggcactaaggtcgagatcaag

SEQ ID NO: 359 - DNA, 741 bp, Artificial Sequence
  source: /note="Description of Artificial Sequence: Synthetic polynucleotide"
caagtccaactggtccagagcggtgcagaagtgaagaagcccggagcgagcgtgaaagtgtcctgcaaggcttccgggtacaccttctccaactacggcatcacttgggtgcgccaggccccgggacagggcctggaatggatggggtggatttccgcgtacaacggcaatacgaactacgctcagaagttccagggtagagtgaccatgactaggaacacctccatttccaccgcctacatggaactgtcctccctgcggagcgaggacaccgccgtgtactattgcgcccggggaccatactactactacatggatgtctgggggaaggggactatggtcaccgtgtcatccgcctcgggaggcggcggatcaggaggacgcgcctctggtggtggaggatcggagatcgtgatgacccagagccctctctccttgcccgtgactcctggggagcccgcatccatttcatgccggagctcccagtcacttctctactccaacggctataactacgtggattggtacctccaaaagccgggccagagcccgcagctgctgatctacctgggctcgaacagggccagcggagtgcctgaccggttctccgggtcgggaagcgggaccgacttcaagctgcaaatctcgagagtggaggccgaggacgtgggaatctactactgtatgcagggccgccagtttccgtactcgttcggacagggcaccaaagtggaaatcaag

SEQ ID NO: 360 - DNA, 714 bp, Artificial Sequence
  source: /note="Description of Artificial Sequence: Synthetic polynucleotide"
gaagtgcaattgctcgaaactggaggaggtctggtgcaacctggaggatcacttcgcctgtcctgcgccgtgtcgggctttgccctgtccaaccatggaatgagctgggtccgccgcgcgccggggaagggcctcgaatgggtgtccggcatcgtctactccggctccacctactacgccgcgtccgtgaagggccggttcacgatttcacgggacaactcgcggaacaccctgtacctccaaatgaattcccttcggccggaggatactgccatctactactgctccgcccacggtggcgaatccgacgtctggggccagggaaccaccgtgaccgtgtccagcgcgtccgggggaggaggaagcgggggtagagcatcgggtggaggcggatcagagatcgtgctgacccagtcccccgccaccttgagcgtgtcaccaggagagtccgccaccctgtcatgccgcgccagccagtccgtgtcctccaacctggcttggtaccagcagaagccggggcaggcccctagactcctgatctatggggcgtcgacccgggcatctggaattcccgataggttcagcggatcgggctcgggcactgacttcactctgaccatctcctcgctgcaagccgaggacgtggctgtgtactactgtcagcagtacggaagctccctgactttcggtggcgggaccaaagtcgagattaag

SEQ ID NO: 361 - DNA, 717 bp, Artificial Sequence
  source: /note="Description of Artificial Sequence: Synthetic polynucleotide"
gaagtgcaattggtggaaactggaggaggacttgtgcaacctggaggatcattgagactgagctgcgcagtgtcgggattcgccctgagcaaccatggaatgtcctgggtcagaagggcccctggaaaaggcctcgaatgggtgtcagggatcgtgtactccggttccacttactacgccgcctccgtgaaggggcgcttcactatctcacgggataactcccgcaataccctgtacctccaaatgaacagcctgcggccggaggataccgccatctactactgttccgcccacggtggagagtctgacgtctggggccagggaactaccgtgaccgtgtcctccgcgtccggcggtggagggagcggcggccgcgccagcggcggcggaggctccgagatcgtgatgacccagagccccgctactctgtcggtgtcgcccggagaaagggcgaccctgtcctgccgggcgtcgcagtccgtgagcagcaagctggcttggtaccagcagaagccgggccaggcaccacgcctgcttatgtacggtgcctccattcgggccaccggaatcccggaccggttctcggggtcggggtccggtaccgagttcacactgaccatttcctcgctcgagcccgaggactttgccgtctattactgccagcagtacggctcctcctcatggacgttcggccaggggaccaaggtcgaaatcaag

SEQ ID NO: 362 - DNA, 723 bp, Artificial Sequence
  source: /note="Description of Artificial Sequence: Synthetic polynucleotide"
gaagtgcaattggtggagactggaggaggagtggtgcaacctggaggaagcctgagactgtcatgcgcggtgtcgggcttcgccctctccaaccacggaatgtcctgggtccgccgggcccctgggaaaggacttgaatgggtgtccggcatcgtgtactcgggttccacctactacgcggcctcagtgaagggccggtttactattagccgcgacaactccagaaacacactgtacctccaaatgaactcgctgcggccggaagataccgctatctactactgctccgcccatgggggagagtcggacgtctggggacagggcaccactgtcactgtgtccagcgcttccggcggtggtggaagcgggggacgggcctcaggaggcggtggcagcgagattgtgctgacccagtcccccgggaccctgagcctgtccccgggagaaagggccaccctctcctgtcgggcatcccagtccgtggggtctactaaccttgcatggtaccagcagaagcccggccaggcccctcgcctgctgatctacgacgcgtccaatagagccaccggcatcccggatcgcttcagcggaggcggatcgggcaccgacttcaccctcaccatttcaaggctggaaccggaggacttcgccgtgtactactgccagcagtatggttcgtccccaccctggacgttcggccaggggactaaggtcgagatcaag

SEQ ID NO: 363 - DNA, 717 bp, Artificial Sequence
  source: /note="Description of Artificial Sequence: Synthetic polynucleotide"
caagtgcaactcgtggaatctggtggaggactcgtgaaacctggaggatcattgagactgtcatgcgcggcctcgggattcacgttctccgattactacatgagctggattcgccaggctccggggaagggactggaatgggtgtcctacatttcctcatccggctccaccatctactacgcggactccgtgaaggggagattcaccattagccgcgataacgccaagaacagcctgtaccttcagatgaactccctgcgggctgaagatactgccgtctactactgcgcaagggagagcggagatgggatggacgtctggggacagggtaccactgtgaccgtgtcgtcggcctccggcggagggggttcgggtggaagggccagcggcggcggaggcagcgacatccagatgacccagtccccctcatcgctgtccgcctccgtgggcgaccgcgtcaccatcacatgccgggcctcacagtcgatctcctcctacctcaattggtatcagcagaagcccggaaaggcccctaagcttctgatctacgcagcgtcctccctgcaatccggggtcccatctcggttctccggctcgggcagcggtaccgacttcactctgaccatctcgagcctgcagccggaggacttcgccacttactactgtcagcaaagctacaccctcgcgtttggccagggcaccaaagtggacatcaag

SEQ ID NO: 364 - DNA, 717 bp, Artificial Sequence
  source: /note="Description of Artificial Sequence: Synthetic polynucleotide"
gaagtgcaattggtggaatcagggggaggacttgtgcagcctggaggatcgctgagactgtcatgtgccgtgtccggctttgccctgtccaaccacgggatgtcctgggtccgccgcgcgcctggaaagggcctcgaatgggtgtcgggtattgtgtacagcggtagcacctactatgccgcatccgtgaaggggagattcaccatcagccgggacaactccaggaacactctgtacctccaaatgaattcgctgaggccagaggacactgccatctactactgctccgcgcatggcggagagtccgacgtctggggacaggggaccaccgtgaccgtgtctagcgcgtccggcggaggcggcagcgggggtcgggcatcagggggcggcggatcggacatccagctcacccagtccccgagctcgctgtccgcctccgtgggagatcgggtcaccatcacgtgccgcgccagccagtcgatttcctcctacctgaactggtaccaacagaagcccggaaaagccccgaagcttctcatctacgccgcctcgagcctgcagtcaggagtgccctcacggttctccggctccggttccggtactgatttcaccctgaccatttcctccctgcaaccggaggacttcgctacttactactgccagcagtcgtactccaccccctacactttcggacaaggcaccaaggtcgaaatcaag

SEQ ID NO: 365 - DNA, 738 bp, Artificial Sequence
  source: /note="Description of Artificial Sequence: Synthetic polynucleotide"
caagtgcaactggtgcaaagcggaggaggattggtcaaacccggaggaagcctgagactgtcatgcgcggcctctggattcaccttctccgattactacatgtcatggatcagacaggccccggggaagggcctcgaatgggtgtcctacatctcgtcctccgggaacaccatctactacgccgacagcgtgaagggccgctttaccatttcccgcgacaacgcaaagaactcgctgtaccttcagatgaattccctgcgggctgaagataccgcggtgtactattgcgcccggtccactatggtccgggaggactactggggacagggcacactcgtgaccgtgtccagcgcgagcgggggtggaggcagcggtggacgcgcctccggcggcggcggttcagacatcgtgctgactcagtcgcccctgtcgctgccggtcaccctgggccaaccggcctcaattagctgcaagtcctcggagagcctggtgcacaactcaggaaagacttacctgaactggttccatcagcggcctggacagtccccacggaggctcatctatgaagtgtccaacagggattcgggggtgcccgaccgcttcactggctccgggtccggcaccgacttcaccttgaaaatctccagagtggaagccgaggacgtgggcgtgtactactgtatgcagggtacccactggcctggaacctttggacaaggaactaagctcgagattaag

SEQ ID NO: 366 - DNA, 717 bp, Artificial Sequence
  source: /note="Description of Artificial Sequence: Synthetic polynucleotide"
caagtgcaactcgtggaatctggtggaggactcgtgcaacccggtggaagccttaggctgtcgtgcgccgtcagcgggtttgctctgagcaaccatggaatgtcctgggtccgccgggcaccgggaaaagggctggaatgggtgtccggcatcgtgtacagcgggtcaacctattacgccgcgtccgtgaagggcagattcactatctcaagagacaacagccggaacaccctgtacttgcaaatgaattccctgcgccccgaggacaccgccatctactactgctccgcccacggaggagagtcggacgtgtggggccagggaacgactgtgactgtgtccagcgcatcaggagggggtggttcgggcggccgggcctcggggggaggaggttccgacattcggctgacccagtccccgtccccactgtcggcctccgtcggcgaccgcgtgaccatcacttgtcaggcgtccgaggacattaacaagttcctgaactggtaccaccagacccctggaaaggcccccaagctgctgatctacgatgcctcgacccttcaaactggagtgcctagccggttctccgggtccggctccggcactgatttcactctgaccatcaactcattgcagccggaagatatcgggacctactattgccagcagtacgaatccctcccgctcacattcggcgggggaaccaaggtcgagattaag

SEQ ID NO: 367 - DNA, 720 bp, Artificial Sequence
  source: /note="Description of Artificial Sequence: Synthetic polynucleotide"
gaagtgcaattggtggaaactggaggaggacttgtgcaacctggaggatcattgcggctctcatgcgctgtctccggcttcgccctgtcaaatcacgggatgtcgtgggtcagacgggccccgggaaagggtctggaatgggtgtcggggattgtgtacagcggctccacctactacgccgcttcggtcaagggccgcttcactatttcacgggacaacagccgcaacaccctctatctgcaaatgaactctctccgcccggaggataccgccatctactactgctccgcacacggcggcgaatccgacgtgtggggacagggaaccactgtcaccgtgtcgtccgcatccggtggcggaggatcgggtggccgggcctccgggggcggcggcagcgagactaccctgacccagtcccctgccactctgtccgtgagcccgggagagagagccacccttagctgccgggccagccagagcgtgggctccaacctggcctggtaccagcagaagccaggacagggtcccaggctgctgatctacggagcctccactcgcgcgaccggcatccccgcgaggttctccgggtcgggttccgggaccgagttcaccctgaccatctcctccctccaaccggaggacttcgcggtgtactactgtcagcagtacaacgattggctgcccgtgacatttggacaggggacgaaggtggaaatcaaa

SEQ ID NO: 368 - DNA, 723 bp, Artificial Sequence
  source: /note="Description of Artificial Sequence: Synthetic polynucleotide"
gaagtgcaattggtggaatctggtggaggacttgtgcaacctggaggatcactgagactgtcatgcgcggtgtccggttttgccctgagcaatcatgggatgtcgtgggtccggcgcgcccccggaaagggtctggaatgggtgtcgggtatcgtctactccgggagcacttactacgccgcgagcgtgaagggccgcttcaccatttcccgcgataactcccgcaacaccctgtacttgcaaatgaactcgctccggcctgaggacactgccatctactactgctccgcacacggaggagaatccgacgtgtggggccagggaactaccgtgaccgtcagcagcgcctccggcggcgggggctcaggcggacgggctagcggcggcggtggctccgagatcgtgctgacccagtcgcctggcactctctcgctgagccccggggaaagggcaaccctgtcctgtcgggccagccagtccattggatcatcctccctcgcctggtatcagcagaaaccgggacaggctccgcggctgcttatgtatggggccagctcaagagcctccggcattcccgaccggttctccgggtccggttccggcaccgatttcaccctgactatctcgaggctggagccagaggacttcgccgtgtactactgccagcagtacgcggggtccccgccgttcacgttcggacagggaaccaaggtcgagatcaag

SEQ ID NO: 369 - protein, 120 aa, Artificial Sequence
  source: /note="Description of Artificial Sequence: Synthetic polypeptide"
QVQLVESGGGLVQPGRSLRLSCAASGFTFSNYAMSWVRQAPGKGLGWVSGISRSGENTYYADSVKGRFTISRDNSKNTLYLQMNSLRDEDTAVYYCARSPAHYYGGMDVWGQGTTVTVSS

SEQ ID NO: 370 - protein, 115 aa, Artificial Sequence
  source: /note="Description of Artificial Sequence: Synthetic polypeptide"
QVQLVESGGGLVQPGRSLRLSCAASGFTFDDYAMHWVRQAPGKGLEWVSGISWNSGSIGYADSVKGRFTISRDNAKNSLYLQMNSLRAEDTALYYCSVHSFLAYWGQGTLVTVSS

SEQ ID NO: 371 - protein, 115 aa, Artificial Sequence
  source: /note="Description of Artificial Sequence: Synthetic polypeptide"
EVQLLESGGGLVQPGGSLRLSCAVSGFALSNHGMSWVRRAPGKGLEWVSGIVYSGSTYYAASVKGRFTISRDNSRNTLYLQMNSLRPEDTAIYYCSAHGGESDVWGQGTTVTVSS

SEQ ID NO: 372 - protein, 120 aa, Artificial Sequence
  source: /note="Description of Artificial Sequence: Synthetic polypeptide"
QVQLVQSGAEVRKTGASVKVSCKASGYIFDNFGINWVRQAPGQGLEWMGWINPKNNNTNYAQKFQGRVTITADESTNTAYMEVSSLRSEDTAVYYCARGPYYYQSYMDVWGQGTMVTVSS

SEQ ID NO: 373 - protein, 123 aa, Artificial Sequence
  source: /note="Description of Artificial Sequence: Synthetic polypeptide"
QVQLQESGGGLVQPGGSLRLSCAASGFTFSSDAMTWVRQAPGKGLEWVSVISGSGGTTYYADSVKGRFTISRDNSKNTLYLQMNSLRAEDTAVYYCAKLDSSGYYYARGPRYWGQGTLVTVSS

SEQ ID NO: 374 - protein, 118 aa, Artificial Sequence
  source: /note="Description of Artificial Sequence: Synthetic polypeptide"
QVQLVQSGAEVKKPGASVKVSCKASGYTFSNYGITWVRQAPGQGLEWMGWISAYNGNTNYAQKFQGRVTMTRNTSISTAYMELSSLRSEDTAVYYCARGPYYYYMDVWGKGTMVTVSS

SEQ ID NO: 375 - protein, 115 aa, Artificial Sequence
  source: /note="Description of Artificial Sequence: Synthetic polypeptide"
EVQLLETGGGLVQPGGSLRLSCAVSGFALSNHGMSWVRRAPGKGLEWVSGIVYSGSTYYAASVKGRFTISRDNSRNTLYLQMNSLRPEDTAIYYCSAHGGESDVWGQGTTVTVSS

SEQ ID NO: 376 - protein, 115 aa, Artificial Sequence
  source: /note="Description of Artificial Sequence: Synthetic polypeptide"
EVQLVETGGGLVQPGGSLRLSCAVSGFALSNHGMSWVRRAPGKGLEWVSGIVYSGSTYYAASVKGRFTISRDNSRNTLYLQMNSLRPEDTAIYYCSAHGGESDVWGQGTTVTVSS

SEQ ID NO: 377 - protein, 115 aa, Artificial Sequence
  source: /note="Description of Artificial Sequence: Synthetic polypeptide"
EVQLVETGGGVVQPGGSLRLSCAVSGFALSNHGMSWVRRAPGKGLEWVSGIVYSGSTYYAASVKGRFTISRDNSRNTLYLQMNSLRPEDTAIYYCSAHGGESDVWGQGTTVTVSS

SEQ ID NO: 378 - protein, 117 aa, Artificial Sequence
  source: /note="Description of Artificial Sequence: Synthetic polypeptide"
QVQLVESGGGLVKPGGSLRLSCAASGFTFSDYYMSWIRQAPGKGLEWVSYISSSGSTIYYADSVKGRFTISRDNAKNSLYLQMNSLRAEDTAVYYCARESGDGMDVWGQGTTVTVSS

SEQ ID NO: 379 - protein, 115 aa, Artificial Sequence
  source: /note="Description of Artificial Sequence: Synthetic polypeptide"
EVQLVESGGGLVQPGGSLRLSCAVSGFALSNHGMSWVRRAPGKGLEWVSGIVYSGSTYYAASVKGRFTISRDNSRNTLYLQMNSLRPEDTAIYYCSAHGGESDVWGQGTTVTVSS

SEQ ID NO: 380 - protein, 117 aa, Artificial Sequence
  source: /note="Description of Artificial Sequence: Synthetic polypeptide"
QVQLVQSGGGLVKPGGSLRLSCAASGFTFSDYYMSWIRQAPGKGLEWVSYISSSGNTIYYADSVKGRFTISRDNAKNSLYLQMNSLRAEDTAVYYCARSTMVREDYWGQGTLVTVSS

SEQ ID NO: 381 - protein, 115 aa, Artificial Sequence
  source: /note="Description of Artificial Sequence: Synthetic polypeptide"
QVQLVESGGGLVQPGGSLRLSCAVSGFALSNHGMSWVRRAPGKGLEWVSGIVYSGSTYYAASVKGRFTISRDNSRNTLYLQMNSLRPEDTAIYYCSAHGGESDVWGQGTTVTVSS

SEQ ID NO: 382 - protein, 115 aa, Artificial Sequence; identical to SEQ ID NO: 376
  source: /note="Description of Artificial Sequence: Synthetic polypeptide"

SEQ ID NO: 383 - protein, 115 aa, Artificial Sequence; identical to SEQ ID NO: 379
  source: /note="Description of Artificial Sequence: Synthetic polypeptide"

SEQ ID NO: 384 - protein, 109 aa, Artificial Sequence
  source: /note="Description of Artificial Sequence: Synthetic polypeptide"
DIVLTQSPGTLSLSPGERATLSCRASQSISSSFLAWYQQKPGQAPRLLIYGASRRATGIPDRFSGSGSGTDFTLTISRLEPEDSAVYYCQQYHSSPSWTFGQGTKLEIK

SEQ ID NO: 385 - protein, 112 aa, Artificial Sequence
  source: /note="Description of Artificial Sequence: Synthetic polypeptide"
DIVMTQTPLSLPVTPGEPASISCRSSQSLLHSNGYNYLDWYLQKPGQSPQLLIYLGSNRASGVPDRFSGSGSGTDFTLKISRVEAEDVGVYYCMQALQTPYTFGQGTKVEIK

SEQ ID NO: 386 - protein, 111 aa, Artificial Sequence
  source: /note="Description of Artificial Sequence: Synthetic polypeptide"
DIVMTQTPLSLSVTPGQPASISCKSSQSLLRNDGKTPLYWYLQKAGQPPQLLIYEVSNRFSGVPDRFSGSGSGTDFTLKISRVEAEDVGAYYCMQNIQFPSFGGGTKLEIK

SEQ ID NO: 387 - protein, 112 aa, Artificial Sequence
  source: /note="Description of Artificial Sequence: Synthetic polypeptide"
DIVMTQTPLSLPVTPGEPASISCRSSQSLLHSNGYNYLNWYLQKPGQSPQLLIYLGSKRASGVPDRFSGSGSGTDFTLHITRVGAEDVGVYYCMQALQTPYTFGQGTKLEIK

SEQ ID NO: 388 - protein, 106 aa, Artificial Sequence
  source: /note="Description of Artificial Sequence: Synthetic polypeptide"
DIQLTQSPSSLSASVGDRVTITCRASQSISSYLNWYQQKPGKAPKLLIYGASTLASGVPARFSGSGSGTHFTLTINSLQSEDSATYYCQQSYKRASFGQGTKVEIK

SEQ ID NO: 389 - protein, 112 aa, Artificial Sequence
  source: /note="Description of Artificial Sequence: Synthetic polypeptide"
EIVMTQSPLSLPVTPGEPASISCRSSQSLLYSNGYNYVDWYLQKPGQSPQLLIYLGSNRASGVPDRFSGSGSGTDFKLQISRVEAEDVGIYYCMQGRQFPYSFGQGTKVEIK

SEQ ID NO: 390 - protein, 106 aa, Artificial Sequence
  source: /note="Description of Artificial Sequence: Synthetic polypeptide"
EIVLTQSPATLSVSPGESATLSCRASQSVSSNLAWYQQKPGQAPRLLIYGASTRASGIPDRFSGSGSGTDFTLTISSLQAEDVAVYYCQQYGSSLTFGGGTKVEIK

SEQ ID NO: 391 - protein, 107 aa, Artificial Sequence
  source: /note="Description of Artificial Sequence: Synthetic polypeptide"
EIVMTQSPATLSVSPGERATLSCRASQSVSSKLAWYQQKPGQAPRLLMYGASIRATGIPDRFSGSGSGTEFTLTISSLEPEDFAVYYCQQYGSSSWTFGQGTKVEIK

SEQ ID NO: 392 - protein, 109 aa, Artificial Sequence
  source: /note="Description of Artificial Sequence: Synthetic polypeptide"
EIVLTQSPGTLSLSPGERATLSCRASQSVGSTNLAWYQQKPGQAPRLLIYDASNRATGIPDRFSGGGSGTDFTLTISRLEPEDFAVYYCQQYGSSPPWTFGQGTKVEIK

SEQ ID NO: 393 - protein, 105 aa, Artificial Sequence
  source: /note="Description of Artificial Sequence: Synthetic polypeptide"
DIQMTQSPSSLSASVGDRVTITCRASQSISSYLNWYQQKPGKAPKLLIYAASSLQSGVPSRFSGSGSGTDFTLTISSLQPEDFATYYCQQSYTLAFGQGTKVDIK

SEQ ID NO: 394 - protein, 107 aa, Artificial Sequence
  source: /note="Description of Artificial Sequence: Synthetic polypeptide"
DIQLTQSPSSLSASVGDRVTITCRASQSISSYLNWYQQKPGKAPKLLIYAASSLQSGVPSRFSGSGSGTDFTLTISSLQPEDFATYYCQQSYSTPYTFGQGTKVEIK

SEQ ID NO: 395 - protein, 112 aa, Artificial Sequence
  source: /note="Description of Artificial Sequence: Synthetic polypeptide"
DIVLTQSPLSLPVTLGQPASISCKSSESLVHNSGKTYLNWFHQRPGQSPRRLIYEVSNRDSGVPDRFTGSGSGTDFTLKISRVEAEDVGVYYCMQGTHWPGTFGQGTKLEIK

SEQ ID NO: 396 - protein, 107 aa, Artificial Sequence
  source: /note="Description of Artificial Sequence: Synthetic polypeptide"
DIRLTQSPSPLSASVGDRVTITCQASEDINKFLNWYHQTPGKAPKLLIYDASTLQTGVPSRFSGSGSGTDFTLTINSLQPEDIGTYYCQQYESLPLTFGGGTKVEIK

SEQ ID NO: 397 - protein, 108 aa, Artificial Sequence
  source: /note="Description of Artificial Sequence: Synthetic polypeptide"
ETTLTQSPATLSVSPGERATLSCRASQSVGSNLAWYQQKPGQGPRLLIYGASTRATGIPARFSGSGSGTEFTLTISSLQPEDFAVYYCQQYNDWLPVTFGQGTKVEIK

SEQ ID NO: 398 - protein, 109 aa, Artificial Sequence
  source: /note="Description of Artificial Sequence: Synthetic polypeptide"
EIVLTQSPGTLSLSPGERATLSCRASQSIGSSSLAWYQQKPGQAPRLLMYGASSRASGIPDRFSGSGSGTDFTLTISRLEPEDFAVYYCQQYAGSPPFTFGQGTKVEIK

SEQ ID NO: 399-428 - skipped (30 entries)

SEQ ID NO: 429 - protein, 243 aa, Artificial Sequence
  source: /note="Description of Artificial Sequence: Synthetic polypeptide"
QVQLQESGPGLVKPSETLSLTCTVSGGSISSSYYYWGWIRQPPGKGLEWIGSIYYSGSAYYNPSLKSRVTISVDTSKNQFSLRLSSVTAADTAVYYCARHWQEWPDAFDIWGQGTMVTVSSGGGGSGGGGSGGGGSETTLTQSPAFMSATPGDKVIISCKASQDIDDAMNWYQQKPGEAPLFIIQSATSPVPGIPPRFSGSGFGTDFSLTINNIESEDAAYYFCLQHDNFPLTFGQGTKLEIK

SEQ ID NO: 430 - protein, 245 aa, Artificial Sequence
  source: /note="Description of Artificial Sequence: Synthetic polypeptide"
QVNLRESGPALVKPTQTLTLTCTFSGFSLRTSGMCVSWIRQPPGKALEWLARIDWDEDKFYSTSLKTRLTISKDTSDNQVVLRMTNMDPADTATYYCARSGAGGTSATAFDIWGPGTMVTVSSGGGGSGGGGSGGGGSDIQMTQSPSSLSASVGDRVTITCRASQDIYNNLAWFQLKPGSAPRSLMYAANKSQSGVPSRFSGSASGTDFTLTISSLQPEDFATYYCQHYYRFPYSFGQGTKLEIK

SEQ ID NO: 431 - protein, 246 aa, Artificial Sequence
  source: /note="Description of Artificial Sequence: Synthetic polypeptide"
EVQLVESGGGLVKPGGSLRLSCAASGFTFSSYSMNWVRQAPGKGLEWVSSISSSSSYIYYADSVKGRFTISRDNAKNSLYLQMNSLRAEDTAVYYCAKTIAAVYAFDIWGQGTTVTVSSGGGGSGGGGSGGGGSEIVLTQSPLSLPVTPEEPASISCRSSQSLLHSNGYNYLDWYLQKPGQSPQLLIYLGSNRASGVPDRFSGSGSGTDFTLKISRVEAEDVGVYYCMQALQTPYTFGQGTKLEIK

SEQ ID NO: 432 - protein, 240 aa, Artificial Sequence
  source: /note="Description of Artificial Sequence: Synthetic polypeptide"
EVQLVESGGGLVKPGGSLRLSCAASGFTFSDYYMSWIRQAPGKGLEWVSYISSSGSTIYYADSVKGRFTISRDNAKNSLYLQMNSLRAEDTAVYYCARDLRGAFDIWGQGTMVTVSSGGGGSGGGGSGGGGSSYVLTQSPSVSAAPGYTATISCGGNNIGTKSVHWYQQKPGQAPLLVIRDDSVRPSKIPGRFSGSNSGNMATLTISGVQAGDEADFYCQVWDSDSEHVVFGGGTKLTVL

SEQ ID NO: 433 - protein, 241 aa, Artificial Sequence
  source: /note="Description of Artificial Sequence: Synthetic polypeptide"
QVQLVQSGAEVKKPGASVKVSCKPSGYTVTSHYIHWVRRAPGQGLEWMGMINPSGGVTAYSQTLQGRVTMTSDTSSSTVYMELSSLRSEDTAMYYCAREGSGSGWYFDFWGRGTLVTVSSGGGGSGGGGSGGGGSSYVLTQPPSVSVSPGQTASITCSGDGLSKKYVSWYQQKAGQSPVVLISRDKERPSGIPDRFSGSNSADTATLTISGTQAMDEADYYCQAWDDTTVVFGGGTKLTVL

SEQ ID NO: 434 - protein, 245 aa, Artificial Sequence
  source: /note="Description of Artificial Sequence: Synthetic polypeptide"
QVQLQESGPGLVKPSQTLSLTCTVSGGSISSGGYYWSWIRQHPGKGLEWIGYIYYSGSTYYNPSLKSRVTISVDTSKNQFSLKLSSVTAADTAVYYCARAGIAARLRGAFDIWGQGTMVTVSSGGGGSGGGGSGGGGSDIVMTQSPSSVSASVGDRVIITCRASQGIRNWLAWYQQKPGKAPNLLIYAASNLQSGVPSRFSGSGSGADFTLTISSLQPEDVATYYCQKYNSAPFTFGPGTKVDIK

SEQ ID NO: 435 - protein, 253 aa, Artificial Sequence
  source: /note="Description of Artificial Sequence: Synthetic polypeptide"
QVQLVQSGAEVKKPGSSVKVSCKASGGTFSSYAISWVRQAPGQGLEWMGGIIPIFGTANYAQKFQGRVTITADESTSTAYMELSSLRSEDTAVYYCARRGGYQLLRWDVGLLRSAFDIWGQGTMVTVSSGGGGSGGGGSGGGGSSYVLTQPPSVSVAPGQTARITCGGNNIGSKSVHWYQQKPGQAPVLVLYGKNNRPSGVPDRFSGSRSGTTASLTITGAQAEDEADYYCSSRDSSGDHLRVFGTGTKVTVL

SEQ ID NO: 436 - protein, 248 aa, Artificial Sequence
  source: /note="Description of Artificial Sequence: Synthetic polypeptide"
EVQLQQSGPGLVKPSQTLSLTCAISGDSVSSNSAAWNWIRQSPSRGLEWLGRTYYRSKWYSFYAISLKSRIIINPDTSKNQFSLQLKSVTPEDTAVYYCARSSPEGLFLYWFDPWGQGTLVTVSSGGDGSGGGGSGGGGSSSELTQDPAVSVALGQTIRITCQGDSLGNYYATWYQQKPGQAPVLVIYGTNNRPSGIPDRFSASSSGNTASLTITGAQAEDEADYYCNSRDSSGHHLLFGTGTKVTVL

SEQ ID NO: 437 - protein, 246 aa, Artificial Sequence
  source: /note="Description of Artificial Sequence: Synthetic polypeptide"
EVQLVESGGGLVQPGGSLRLSCAASGFTFSSYAMSWVRQAPGKGLEWVSAISGSGGSTYYADSVKGRFTISRDNSKNTLYLQMNSLRAEDTAVYYCAKVEGSGSLDYWGQGTLVTVSSGGGGSGGGGSGGGGSEIVMTQSPGTLSLSPGERATLSCRASQSVSSAYLAWYQQKPGQPPRLLISGASTRATGIPDRFGGSGSGTDFTLTISRLEPEDFAVYYCQHYGSSFNGSSLFTFGQGTRLEIK

SEQ ID NO: 438 - protein, 241 aa, Artificial Sequence
  source: /note="Description of Artificial Sequence: Synthetic polypeptide"
EVQLVETGGGLVQPGGSLRLSCAASGITFSRYPMSWVRQAPGKGLEWVSGISDSGVSTYYADSAKGRFTISRDNSKNTLFLQMSSLRDEDTAVYYCVTRAGSEASDIWGQGTMVTVSSGGGGSGGGGSGGGGSEIVLTQSPATLSLSPGERATLSCRASQSVSNSLAWYQQKPGQAPRLLIYDASSRATGIPDRFSGSGSGTDFTLTISRLEPEDFAIYYCQQFGTSSGLTFGGGTKLEIK

SEQ ID NO: 439 - protein, 248 aa, Artificial Sequence
  source: /note="Description of Artificial Sequence: Synthetic polypeptide"
QVQLVESGGGLVQPGGSLRLSCAASGFTFSSYAMSWVRQAPGKGLEWVSAISGSGGSTYYADSVKGRFTISRDNAKNSLYLQMNSLRAEDTAIYYCARATYKRELRYYYGMDVWGQGTMVTVSSGGGGSGGGGSGGGGSEIVMTQSPGTVSLSPGERATLSCRASQSVSSSFLAWYQQKPGQAPRLLIYGASSRATGIPDRFSGSGSGTDFTLTISRLEPEDSAVYYCQQYHSSPSWTFGQGTRLEIK

SEQ ID NO: 440 - protein, 248 aa, Artificial Sequence
  source: /note="Description of Artificial Sequence: Synthetic polypeptide"
EVQLVETGGGLVQPGGSLRLSCAASGFTFSSYAMSWVRQAPGKGLEWVSAISGSGGSTYYADSVKGRFTISRDNSKNTLYLQMNTLKAEDTAVYYCARATYKRELRYYYGMDVWGQGTTVTVSSGGGGSGGGGSGGGGSEIVLTQSPSTLSLSPGESATLSCRASQSVSTTFLAWYQQKPGQAPRLLIYGSSNRATGIPDRFSGSGSGTDFTLTIRRLEPEDFAVYYCQQYHSSPSWTFGQGTKVEIK

SEQ ID NO: 441 - protein, 239 aa, Artificial Sequence
  source: /note="Description of Artificial Sequence: Synthetic polypeptide"
EVQLVETGGGLVQPGRSLRLSCAASGFTFDDYAMHWVRQAPGKGLEWVSGISWNSGSIGYADSVKGRFTISRDNAKNSLYLQMNSLRDEDTAVYYCARVGKAVPDVWGQGTTVTVSSGGGGSGGGGSGGGGSDIVMTQTPSSLSASVGDRVTITCRASQSISSYLNWYQQKPGKAPKLLIYAASSLQSGVPSRFSGSGSGTDFTLTISSLQPEDFATYYCQQSYSTPYSFGQGTRLEIK

SEQ ID NO: 442 - protein, 246 aa, Artificial Sequence
  source: /note="Description of Artificial Sequence: Synthetic polypeptide"
EVQLVESGGGLVQPGRSLRLSCTASGFTFDDYAMHWVRQRPGKGLEWVASINWKGNSLAYGDSVKGRFAISRDNAKNTVFLQMNSLRTEDTAVYYCASHQGVAYYNYAMDVWGRGTLVTVSSGGGGSGGGGSGGGGSEIVLTQSPGTLSLSPGERATLSCRATQSIGSSFLAWYQQRPGQAPRLLIYGASQRATGIPDRFSGRGSGTDFTLTISRVEPEDSAVYYCQHYESSPSWTFGQGTKVEIK

SEQ ID NO: 443 - protein, 241 aa, Artificial Sequence
  source: /note="Description of Artificial Sequence: Synthetic polypeptide"
EVQLVESGGGLVQPGGSLRLSCAASGFTFSSYAMSWVRQAPGKGLEWVSAISGSGGSTYYADSVKGRFTISRDNSKNTLYLQMNSLRAEDTAVYYCAKVVRDGMDVWGQGTTVTVSSGGGGSGGGGSGGGGSEIVLTQSPATLSLSPGERATLSCRASQSVSSSYLAWYQQKPGQAPRLLIYGASSRATGIPDRFSGNGSGTDFTLTISRLEPEDFAVYYCQQYGSPPRFTFGPGTKVDIK

SEQ ID NO: 444 - protein, 242 aa, Artificial Sequence
  source: /note="Description of Artificial Sequence: Synthetic polypeptide"
EVQLLESGGGLVQPGGSLRLSCAASGFTFSSYAMSWVRQAPGKGLEWVSAISGSGGSTYYADSVKGRFTISRDNSKNTLYLQMNSLRAEDTAVYYCAKIPQTGTFDYWGQGTLVTVSSGGGGSGGGGSGGGGSEIVLTQSPGTLSLSPGERATLSCRASQSVSSSYLAWYQQRPGQAPRLLIYGASSRATGIPDRFSGSGSGTDFTLTISRLEPEDFAVYYCQHYGSSPSWTFGQGTRLEIK

SEQ ID NO: 445 - protein, 248 aa, Artificial Sequence
  source: /note="Description of Artificial Sequence: Synthetic polypeptide"
EVQLVETGGGLVQPGGSLRLSCAASGFTFSSYAMSWVRQAPGKGLEWVSAISGSGGSTYYADSVKGRFTMSRENDKNSVFLQMNSLRVEDTGVYYCARANYKRELRYYYGMDVWGQGTMVTVSSGGGGSGGGGSGGGGSEIVMTQSPGTLSLSPGESATLSCRASQRVASNYLAWYQHKPGQAPSLLISGASSRATGVPDRFSGSGSGTDFTLAISRLEPEDSAVYYCQHYDSSPSWTFGQGTKVEIK

SEQ ID NO: 446 - protein, 244 aa, Artificial Sequence
  source: /note="Description of Artificial Sequence: Synthetic polypeptide"
EVQLLETGGGLVQPGGSLRLSCAASGFSFSSYAMSWVRQAPGKGLEWVSAISGSGGSTYYADSVKGRFTISRDNSKNTLYLQMNSLRAEDTAVYYCAKALVGATGAFDIWGQGTLVTVSSGGGGSGGGGSGGGGSEIVLTQSPGTLSLSPGERATLSCRASQSLSSNFLAWYQQKPGQAPGLLIYGASNWATGTPDRFSGSGSGTDFTLTITRLEPEDFAVYYCQYYGTSPMYTFGQGTKVEIK

SEQ ID NO: 447 - protein, 244 aa, Artificial Sequence
  source: /note="Description of Artificial Sequence: Synthetic polypeptide"
EVQLLESGGGLVQPGGSLRLSCAASGFTFSSYAMSWVRQAPGKGLEWVSAISGSGGSTYYADSVKGRFTISRDNSKNTLYLQMNSLRAEDTAVYYCVLWFGEGFDPWGQGTLVTVSSGGGGSGGGGSGGGGSDIVLTQSPLSLPVTPGEPASISCRSSQSLLHSNGYNYLDWYLQKPGQSPQLLIYLGSNRASGVPDRFSGSGSGTDFTLKISRVEAEDVGVYYCMQALQTPLTFGGGTKVDIK

SEQ ID NO: 448 - protein, 251 aa, Artificial Sequence
  source: /note="Description of Artificial Sequence: Synthetic polypeptide"
QVQLVESGGGLVQPGGSLRLSCAASGFTFSSYAMSWVRQAPGKGLEWVSAISGSGGSTYYADSVKGRFTISRDNSKNTLYLQMNSLRAEDTAVYYCAKVGYDSSGYYRDYYGMDVWGQGTTVTVSSGGGGSGGGGSGGGGSEIVLTQSPGTLSLSPGERATLSCRASQSVSSSYLAWYQQKPGQAPRLLIYGTSSRATGISDRFSGSGSGTDFTLTISRLEPEDFAVYYCQHYGNSPPKFTFGPGTKLEIK

SEQ ID NO: 449 - protein, 246 aa, Artificial Sequence
  source: /note="Description of Artificial Sequence: Synthetic polypeptide"
EVQLVESGGGLVQPGGSLRLSCAASGFTFSSYAMSWVRQAPGKGLEWVSAISGSGGSTYYADSVKGRFTISRDNSKNTLYLQMNSLRAEDTAVYYCAKMGWSSGYLGAFDIWGQGTTVTVSSGGGGSGGGGSGGGGSEIVLTQSPGTLSLSPGERATLSCRASQSVASSFLAWYQQKPGQAPRLLIYGASGRATGIPDRFSGSGSGTDFTLTISRLEPEDFAVYYCQHYGGSPRLTFGGGTKVDIK

SEQ ID NO: 450 - DNA, 729 bp, Artificial Sequence
  source: /note="Description of Artificial Sequence: Synthetic polynucleotide"
caagtgcagcttcaggaaagcggaccgggcctggtcaagccatccgaaactctctccctgacttgcactgtgtctggcggttccatctcatcgtcgtactactactggggctggattaggcagccgcccggaaagggactggagtggatcggaagcatctactattccggctcggcgtactacaaccctagcctcaagtcgagagtgaccatctccgtggatacctccaagaaccagttttccctgcgcctgagctccgtgaccgccgctgacaccgccgtgtactactgtgctcggcattggcaggaatggcccgatgccttcgacatttggggccagggcactatggtcactgtgtcatccgggggtggaggcagcgggggaggagggtccggggggggaggttcagagacaaccttgacccagtcacccgcattcatgtccgccactccgggagacaaggtcatcatctcgtgcaaagcgtcccaggatatcgacgatgccatgaattggtaccagcagaagcctggcgaagcgccgctgttcattatccaatccgcaacctcgcccgtgcctggaatcccaccgcggttcagcggcagcggtttcggaaccgacttttccctgaccattaacaacattgagtccgaggacgccgcctactacttctgcctgcaacacgacaacttccctctcacgttcggccagggaaccaagctggaaatcaag

SEQ ID NO: 451 - DNA, 735 bp, Artificial Sequence
  source: /note="Description of Artificial Sequence: Synthetic polynucleotide"
caagtcaatctgcgcgaatccggccccgccttggtcaagcctacccagaccctcactctgacctgtactttctccggcttctccctgcggacttccgggatgtgcgtgtcctggatcagacagcctccgggaaaggccctggagtggctcgctcgcattgactgggatgaggacaagttctactccacctcactcaagaccaggctgaccatcagcaaagatacctctgacaaccaagtggtgctccgcatgaccaacatggacccagccgacactgccacttactactgcgcgaggagcggagcgggcggaacctccgccaccgccttcgatatttggggcccgggtaccatggtcaccgtgtcaagcggaggaggggggtccgggggcggcggttccgggggaggcggatcggacattcagatgactcagtcaccatcgtccctgagcgctagcgtgggcgacagagtgacaatcacttgccgggcatcccaggacatctataacaaccttgcgtggttccagctgaagcctggttccgcaccgcggtcacttatgtacgccgccaacaagagccagtcgggagtgccgtcccggttttccggttcggcctcgggaactgacttcaccctgacgatctccagcctgcaacccgaggatttcgccacctactactgccagcactactaccgctttccctactcgttcggacagggaaccaagctggaaatcaag

SEQ ID NO: 452 - DNA, 738 bp, Artificial Sequence
  source: /note="Description of Artificial Sequence: Synthetic polynucleotide"
gaagtgcagcttgtcgaatccggggggggactggtcaagccgggcggatcactgagactgtcctgcgccgcgagcggcttcacgttctcctcctactccatgaactgggtccgccaagcccccgggaagggactggaatgggtgtcctctatctcctcgtcgtcgtcctacatctactacgccgactccgtgaagggaagattcaccatttcccgcgacaacgcaaagaactcactgtacttgcaaatgaactcactccgggccgaagatactgctgtgtactattgcgccaagactattgccgccgtctacgctttcgacatctggggccagggaaccaccgtgactgtgtcgtccggtggtggtggctcgggcggaggaggaagcggcggcggggggtccgagattgtgctgacccagtcgccactgagcctccctgtgacccccgaggaacccgccagcatcagctgccggtccagccagtccctgctccactccaacggatacaattacctcgattggtaccttcagaagcctggacaaagcccgcagctgctcatctacttgggatcaaaccgcgcgtcaggagtgcctgaccggttctccggctcgggcagcggtaccgatttcaccctgaaaatctccagggtggaggcagaggacgtgggagtgtattactgtatgcaggcgctgcagactccgtacacatttgggcagggcaccaagctggagatcaag

SEQ ID NO: 453 - DNA, 720 bp, Artificial Sequence
  source: /note="Description of Artificial Sequence: Synthetic polynucleotide"
gaagtccagctcgtggagtccggcggaggccttgtgaagcctggaggttcgctgagactgtcctgcgccgcctccggcttcaccttctccgactactacatgtcctggatcagacaggccccgggaaagggcctggaatgggtgtcctacatctcgtcatcgggcagcactatctactacgcggactcagtgaaggggcggttcaccatttcccgggataacgcgaagaactcgctgtatctgcaaatgaactcactgagggccgaggacaccgccgtgtactactgcgcccgcgatctccgcggggcatttgacatctggggacagggaaccatggtcacagtgtccagcggagggggaggatcgggtggcggaggttccgggggtggaggctcctcctacgtgctgactcagagcccaagcgtcagcgctgcgcccggttacacggcaaccatctcctgtggcggaaacaacattgggaccaagtctgtgcactggtatcagcagaagccgggccaagctcccctgttggtgatccgcgatgactccgtgcggcctagcaaaattccgggacggttctccggctccaacagcggcaatatggccactctcaccatctcgggagtgcaggccggagatgaagccgacttctactgccaagtctgggactcagactccgagcatgtggtgttcgggggcggaaccaagctgactgtgctc

SEQ ID NO: 454 - DNA, 723 bp, Artificial Sequence
  source: /note="Description of Artificial Sequence: Synthetic polynucleotide"
caagtgcagctggtgcagagcggggccgaagtcaagaagccgggagcctccgtgaaagtgtcctgcaagccttcgggatacaccgtgacctcccactacattcattgggtccgccgcgcccccggccaaggactcgagtggatgggcatgatcaaccctagcggcggagtgaccgcgtacagccagacgctgcagggacgcgtgactatgacctcggatacctcctcctccaccgtctatatggaactgtccagcctgcggtccgaggataccgccatgtactactgcgcccgggaaggatcaggctccgggtggtatttcgacttctggggaagaggcaccctcgtgactgtgtcatctgggggagggggttccggtggtggcggatcgggaggaggcggttcatcctacgtgctgacccagccaccctccgtgtccgtgagccccggccagactgcatcgattacatgtagcggcgacggcctctccaagaaatacgtgtcgtggtaccagcagaaggccggacagagcccggtggtgctgatctcaagagataaggagcggcctagcggaatcccggacaggttctcgggttccaactccgcggacactgctactctgaccatctcggggacccaggctatggacgaagccgattactactgccaagcctgggacgacactactgtcgtgtttggagggggcaccaagttgaccgtcctt

SEQ ID NO: 455 - DNA, 735 bp, Artificial Sequence
  source: /note="Description of Artificial Sequence: Synthetic polynucleotide"
caagtgcagcttcaggagagcggcccgggactcgtgaagccgtcccagaccctgtccctgacttgcaccgtgtcgggaggaagcatctcgagcggaggctactattggtcgtggattcggcagcaccctggaaagggcctggaatggatcggctacatctactactccggctcgacctactacaacccatcgctgaagtccagagtgacaatctcagtggacacgtccaagaatcagttcagcctgaagctctcttccgtgactgcggccgacaccgccgtgtactactgcgcacgcgctggaattgccgcccggctgaggggtgccttcgacatttggggacagggcaccatggtcaccgtgtcctccggcggcggaggttccgggggtggaggctcaggaggaggggggtccgacatcgtcatgactcagtcgccctcaagcgtcagcgcgtccgtcggggacagagtgatcatcacctgtcgggcgtcccagggaattcgcaactggctggcctggtatcagcagaagcccggaaaggcccccaacctgttgatctacgccgcctcaaacctccaatccggggtgccgagccgcttcagcggctccggttcgggtgccgatttcactctgaccatctcctccctgcaacctgaagatgtggctacctactactgccaaaagtacaactccgcaccttttactttcggaccggggaccaaagtggacattaag

SEQ ID NO: 456 - DNA, 759 bp, Artificial Sequence
  source: /note="Description of Artificial Sequence: Synthetic polynucleotide"
caagtgcagctggtccagtcgggcgccgaggtcaagaagcccgggagctctgtgaaagtgtcctgcaaggcctccgggggcacctttagctcctacgccatctcctgggtccgccaagcaccgggtcaaggcctggagtggatggggggaattatccctatcttcggcactgccaactacgcccagaagttccagggacgcgtgaccattaccgcggacgaatccacctccaccgcttatatggagctgtccagcttgcgctcggaagataccgccgtgtactactgcgcccggaggggtggataccagctgctgagatgggacgtgggcctcctgcggtcggcgttcgacatctggggccagggcactatggtcactgtgtccagcggaggaggcggatcgggaggcggcggatcagggggaggcggttccagctacgtgcttactcaacccccttcggtgtccgtggccccgggacagaccgccagaatcacttgcggaggaaacaacattgggtccaagagcgtgcattggtaccagcagaagccaggacaggcccctgtgctggtgctctacgggaagaacaatcggcccagcggagtgccggacaggttctcgggttcacgctccggtacaaccgcttcactgactatcaccggggcccaggcagaggatgaagcggactactactgttcctcccgggattcatccggcgaccacctccgggtgttcggaaccggaacgaaggtcaccgtgctg

SEQ ID NO: 457 - DNA, 744 bp, Artificial Sequence
  source: /note="Description of Artificial Sequence: Synthetic polynucleotide"
gaagtgcagctccaacagtcaggaccggggctcgtgaagccatcccagaccctgtccctgacttgtgccatctcgggagatagcgtgtcatcgaactccgccgcctggaactggattcggcagagcccgtcccgcggactggagtggcttggaaggacctactaccggtccaagtggtactctttctacgcgatctcgctgaagtcccgcattatcattaaccctgatacctccaagaatcagttctccctccaactgaaatccgtcacccccgaggacacagcagtgtattactgcgcacggagcagccccgaaggactgttcctgtattggtttgacccctggggccaggggactcttgtgaccgtgtcgagcggcggagatgggtccggtggcggtggttcggggggcggcggatcatcatccgaactgacccaggacccggctgtgtccgtggcgctgggacaaaccatccgcattacgtgccagggagactccctgggcaactactacgccacttggtaccagcagaagccgggccaagcccctgtgttggtcatctacgggaccaacaacagaccttccggcatccccgaccggttcagcgcttcgtcctccggcaacactgccagcctgaccatcactggagcgcaggccgaagatgaggccgactactactgcaacagcagagactcctcgggtcatcacctcttgttcggaactggaaccaaggtcaccgtgctg

SEQ ID NO: 458 - DNA, 738 bp, Artificial Sequence
  source: /note="Description of Artificial Sequence: Synthetic polynucleotide"
gaagtgcagctcgtggagtcaggaggcggcctggtccagccgggagggtcccttagactgtcatgcgccgcaagcggattcactttctcctcctatgccatgagctgggtccgccaagcccccggaaagggactggaatgggtgtccgccatctcggggtctggaggctcaacttactacgctgactccgtgaagggacggttcaccattagccgcgacaactccaagaacaccctctacctccaaatgaactccctgcgggccgaggataccgccgtctactactgcgccaaagtggaaggttcaggatcgctggactactggggacagggtactctcgtgaccgtgtcatcgggcggaggaggttccggcggtggcggctccggcggcggagggtcggagatcgtgatgacccagagccctggtactctgagcctttcgccgggagaaagggccaccctgtcctgccgcgcttcccaatccgtgtcctccgcgtacttggcgtggtaccagcagaagccgggacagccccctcggctgctgatcagcggggccagcacccgggcaaccggaatcccagacagattcgggggttccggcagcggcacagatttcaccctgactatttcgaggttggagcccgaggactttgcggtgtattactgtcagcactacgggtcgtcctttaatggctccagcctgttcacgttcggacaggggacccgcctggaaatcaag

SEQ ID NO: 459 - DNA, 723 bp, Artificial Sequence
  source: /note="Description of Artificial Sequence: Synthetic polynucleotide"
gaagtgcaactggtggaaaccggtggcggcctggtgcagcctggaggatcattgaggctgtcatgcgcggccagcggtattaccttctcccggtaccccatgtcctgggtcagacaggccccggggaaagggcttgaatgggtgtccgggatctcggactccggtgtcagcacttactacgccgactccgccaagggacgcttcaccatttcccgggacaactcgaagaacaccctgttcctccaaatgagctccctccgggacgaggatactgcagtgtactactgcgtgacccgcgccgggtccgaggcgtctgacatttggggacagggcactatggtcaccgtgtcgtccggcggagggggctcgggaggcggtggcagcggaggaggagggtccgagatcgtgctgacccaatccccggccaccctctcgctgagccctggagaaagggcaaccttgtcctgtcgcgcgagccagtccgtgagcaactccctggcctggtaccagcagaagcccggacaggctccgagacttctgatctacgacgcttcgagccgggccactggaatccccgaccgcttttcggggtccggctcaggaaccgatttcaccctgacaatctcacggctggagccagaggatttcgccatctattactgccagcagttcggtacttcctccggcctgactttcggaggcggcacgaagctcgaaatcaag

SEQ ID NO: 460 - DNA, 744 bp, Artificial Sequence
  source: /note="Description of Artificial Sequence: Synthetic polynucleotide"
caagtgcagctcgtggaatcgggtggcggactggtgcagccggggggctcacttagactgtcctgcgcggccagcggattcactttctcctcctacgccatgtcctgggtcagacaggcccctggaaagggcctggaatgggtgtccgcaatcagcggcagcggcggctcgacctattacgcggattcagtgaagggcagattcaccatttcccgggacaacgccaagaactccttgtaccttcaaatgaactccctccgcgcggaagataccgcaatctactactgcgctcgggccacttacaagagggaactgcgctactactacgggatggacgtctggggccagggaaccatggtcaccgtgtccagcggaggaggaggatcgggaggaggcggtagcgggggtggagggtcggagatcgtgatgacccagtcccccggcactgtgtcgctgtcccccggcgaacgggccaccctgtcatgtcgggccagccagtcagtgtcgtcaagcttcctcgcctggtaccagcagaaaccgggacaagctccccgcctgctgatctacggagccagcagccgggccaccggtattcctgaccggttctccggttcggggtccgggaccgactttactctgactatctctcgcctcgagccagaggactccgccgtgtattactgccagcagtaccactcctccccgtcctggacgttcggacagggcacaaggctggagattaag

SEQ ID NO: 461 - DNA, 744 bp, Artificial Sequence
  source: /note="Description of Artificial Sequence: Synthetic polynucleotide"
gaggtgcagcttgtggaaaccggtggcggactggtgcagcccggaggaagcctcaggctgtcctgcgccgcgtccggcttcaccttctcctcgtacgccatgtcctgggtccgccaggcccccggaaagggcctggaatgggtgtccgccatctctggaagcggaggttccacgtactacgcggacagcgtcaagggaaggttcacaatctcccgcgataattcgaagaacactctgtaccttcaaatgaacaccctgaaggccgaggacactgctgtgtactactgcgcacgggccacctacaagagagagctccggtactactacggaatggacgtctggggccagggaactactgtgaccgtgtcctcgggagggggtggctccggggggggcggctccggcggaggcggttccgagattgtgctgacccagtcaccttcaactctgtcgctgtccccgggagagagcgctactctgagctgccgggccagccagtccgtgtccaccaccttcctcgcctggtatcagcagaagccggggcaggcaccacggctcttgatctacgggtcaagcaacagagcgaccggaattcctgaccgcttctcggggagcggttcaggcaccgacttcaccctgactatccggcgcctggaacccgaagatttcgccgtgtattactgtcaacagtaccactcctcgccgtcctggacctttggccaaggaaccaaagtggaaatcaag

SEQ ID NO: 462 - DNA, 717 bp, Artificial Sequence
  source: /note="Description of Artificial Sequence: Synthetic polynucleotide"
gaagtgcagctcgtggaaactggaggtggactcgtgcagcctggacggtcgctgcggctgagctgcgctgcatccggcttcaccttcgacgattatgccatgcactgggtcagacaggcgccagggaagggacttgagtgggtgtccggtatcagctggaatagcggctcaatcggatacgcggactccgtgaagggaaggttcaccatttcccgcgacaacgccaagaactccctgtacttgcaaatgaacagcctccgggatgaggacactgccgtgtactactgcgcccgcgtcggaaaagctgtgcccgacgtctggggccagggaaccactgtgaccgtgtccagcggcgggggtggatcgggcggtggagggtccggtggagggggctcagatattgtgatgacccagaccccctcgtccctgtccgcctcggtcggcgaccgcgtgactatcacatgtagagcctcgcagagcatctccagctacctgaactggtatcagcagaagccggggaaggccccgaagctcctgatctacgcggcatcatcactgcaatcgggagtgccgagccggttttccgggtccggctccggcaccgacttcacgctgaccatttcttccctgcaacccgaggacttcgccacttactactgccagcagtcctactccaccccttactccttcggccaaggaaccaggctggaaatcaag

SEQ ID NO: 463 - DNA, 738 bp, Artificial Sequence
  source: /note="Description of Artificial Sequence: Synthetic polynucleotide"
gaagtgcagctcgtggagagcgggggaggattggtgcagcccggaaggtccctgcggctctcctgcactgcgtctggcttcaccttcgacgactacgcgatgcactgggtcagacagcgcccgggaaagggcctggaatgggtcgcctcaatcaactggaagggaaactccctggcctatggcgacagcgtgaagggccgcttcgccatttcgcgcgacaacgccaagaacaccgtgtttctgcaaatgaattccctgcggaccgaggataccgctgtgtactactgcgccagccaccagggcgtggcatactataactacgccatggacgtgtggggaagagggacgctcgtcaccgtgtcctccgggggcggtggatcgggtggaggaggaagcggtggcgggggcagcgaaatcgtgctgactcagagcccgggaactctttcactgtccccgggagaacgggccactctctcgtgccgggccacccagtccatcggctcctccttccttgcctggtaccagcagaggccaggacaggcgccccgcctgctgatctacggtgcttcccaacgcgccactggcattcctgaccggttcagcggcagagggtcgggaaccgatttcacactgaccatttcccgggtggagcccgaagattcggcagtctactactgtcagcattacgagtcctccccttcatggaccttcggtcaagggaccaaagtggagatcaag

SEQ ID NO: 464 - DNA, 723 bp, Artificial Sequence
  source: /note="Description of Artificial Sequence: Synthetic polynucleotide"
gaggtgcagttggtcgaaagcgggggcgggcttgtgcagcctggcggatcactgcggctgtcctgcgcggcatcaggcttcacgttttcttcctacgccatgtcctgggtgcgccaggcccctggaaagggactggaatgggtgtccgcgatttcggggtccggcgggagcacctactacgccgattccgtgaagggccgcttcactatctcgcgggacaactccaagaacaccctctacctccaaatgaatagcctgcgggccgaggataccgccgtctactattgcgctaaggtcgtgcgcgacggaatggacgtgtggggacagggtaccaccgtgacagtgtcctcggggggaggcggtagcggcggaggaggaagcggtggtggaggttccgagattgtgctgactcaatcacccgcgaccctgagcctgtcccccggcgaaagggccactctgtcctgtcgggccagccaatcagtctcctcctcgtacctggcctggtaccagcagaagccaggacaggctccgagactccttatctatggcgcatcctcccgcgccaccggaatcccggataggttctcgggaaacggatcggggaccgacttcactctcaccatctcccggctggaaccggaggacttcgccgtgtactactgccagcagtacggcagcccgcctagattcactttcggccccggcaccaaagtggacatcaag

SEQ ID NO: 465 - DNA, 726 bp, Artificial Sequence
  source: /note="Description of Artificial Sequence: Synthetic polynucleotide"
gaagtgcagctgctggagtccggcggtggattggtgcaaccggggggatcgctcagactgtcctgtgcggcgtcaggcttcaccttctcgagctacgccatgtcatgggtcagacaggcccctggaaagggtctggaatgggtgtccgccatttccgggagcgggggatctacatactacgccgatagcgtgaagggccgcttcaccatttcccgggacaactccaagaacactctctatctgcaaatgaactccctccgcgctgaggacactgccgtgtactactgcgccaaaatccctcagaccggcaccttcgactactggggacaggggactctggtcaccgtcagcagcggtggcggaggttcggggggaggaggaagcggcggcggagggtccgagattgtgctgacccagtcacccggcactttgtccctgtcgcctggagaaagggccaccctttcctgccgggcatcccaatccgtgtcctcctcgtacctggcctggtaccagcagaggcccggacaggccccacggcttctgatctacggagcaagcagccgcgcgaccggtatcccggaccggttttcgggctcgggctcaggaactgacttcaccctcaccatctcccgcctggaacccgaagatttcgctgtgtattactgccagcactacggcagctccccgtcctggacgttcggccagggaactcggctggagatcaag

SEQ ID NO: 466 - DNA, 744 bp, Artificial Sequence
  source: /note="Description of Artificial Sequence: Synthetic polynucleotide"
gaagtgcaactggtggaaaccggtggaggactcgtgcagcctggcggcagcctccggctgagctgcgccgcttcgggattcaccttttcctcctacgcgatgtcttgggtcagacaggcccccggaaaggggctggaatgggtgtcagccatctccggctccggcggatcaacgtactacgccgactccgtgaaaggccggttcaccatgtcgcgcgagaatgacaagaactccgtgttcctgcaaatgaactccctgagggtggaggacaccggagtgtactattgtgcgcgcgccaactacaagagagagctgcggtactactacggaatggacgtctggggacagggaactatggtgaccgtgtcatccggtggagggggaagcggcggtggaggcagcgggggcgggggttcagaaattgtcatgacccagtccccgggaactctttccctctcccccggggaatccgcgactttgtcctgccgggccagccagcgcgtggcctcgaactacctcgcatggtaccagcataagccaggccaagccccttccctgctgatttccggggctagcagccgcgccactggcgtgccggataggttctcgggaagcggctcgggtaccgatttcaccctggcaatctcgcggctggaaccggaggattcggccgtgtactactgccagcactatgactcatccccctcctggacattcggacagggcaccaaggtcgagatcaag

SEQ ID NO: 467 - DNA, 732 bp, Artificial Sequence
  source: /note="Description of Artificial Sequence: Synthetic polynucleotide"
gaagtgcagctgctcgaaaccggtggagggctggtgcagccagggggctccctgaggctttcatgcgccgctagcggattctccttctcctcttacgccatgtcgtgggtccgccaagcccctggaaaaggcctggaatgggtgtccgcgatttccgggagcggaggttcgacctattacgccgactccgtgaagggccgctttaccatctcccgggataactccaagaacactctgtacctccaaatgaactcgctgagagccgaggacaccgccgtgtattactgcgcgaaggcgctggtcggcgcgactggggcattcgacatctggggacagggaactcttgtgaccgtgtcgagcggaggcggcggctccggcggaggagggagcgggggcggtggttccgaaatcgtgttgactcagtccccgggaaccctgagcttgtcacccggggagcgggccactctctcctgtcgcgcctcccaatcgctctcatccaatttcctggcctggtaccagcagaagcccggacaggccccgggcctgctcatctacggcgcttcaaactgggcaacgggaacccctgatcggttcagcggaagcggatcgggtactgactttaccctgaccatcaccagactggaaccggaggacttcgccgtgtactactgccagtactacggcacctcccccatgtacacattcggacagggtaccaaggtcgagattaag

SEQ ID NO: 468 - DNA, 733 bp, Artificial Sequence
  source: /note="Description of Artificial Sequence: Synthetic polynucleotide"
gaagtgcagctgcttgagagcggtggaggtctggtgcagcccgggggatcactgcgcctgtcctgtgccgcgtccggtttcactttctcctcgtacgccatgtcgtgggtcagacaggcaccgggaaagggactggaatgggtgtcagccatttcgggttcggggggcagcacctactacgctgactccgtgaagggccggttcaccatttcccgcgacaactccaagaacaccttgtacctccaaatgaactccctgcgggccgaagataccgccgtgtattactgcgtgctgtggttcggagagggattcgacccgtggggacaaggaacactcgtgactgtgtcatccggcggaggcggcagcggtggcggcggttccggcggcggcggatctgacatcgtgttgacccagtcccctctgagcctgccggtcactcctggcgaaccagccagcatctcctgccggtcgagccagtccctcctgcactccaatgggtacaactacctcgattggtatctgcaaaagccgggccagagcccccagctgctgatctaccttgggtcaaaccgcgcttccggggtgcctgatagattctccgggtccgggagcggaaccgactttaccctgaaaatctcgagggtggaggccgaggacgtcggagtgtactactgcatgcaggcgctccagactcccctgaccttcggaggaggaacgaaggtcgacatcaaga

SEQ ID NO: 469 - DNA, 753 bp, Artificial Sequence
  source: /note="Description of Artificial Sequence: Synthetic polynucleotide"
caagtgcagctcgtggagtcaggcggaggactggtgcagcccgggggctccctgagactttcctgcgcggcatcgggttttaccttctcctcctatgctatgtcctgggtgcgccaggccccgggaaagggactggaatgggtgtccgcaatcagcggtagcgggggctcaacatactacgccgactccgtcaagggtcgcttcactatttcccgggacaactccaagaataccctgtacctccaaatgaacagcctcagggccgaggatactgccgtgtactactgcgccaaagtcggatacgatagctccggttactaccgggactactacggaatggacgtgtggggacagggcaccaccgtgaccgtgtcaagcggcggaggcggttcaggagggggaggctccggcggtggagggtccgaaatcgtcctgactcagtcgcctggcactctgtcgttgtccccgggggagcgcgctaccctgtcgtgtcgggcgtcgcagtccgtgtcgagctcctacctcgcgtggtaccagcagaagcccggacaggcccctagacttctgatctacggcacttcttcacgcgccaccgggatcagcgacaggttcagcggctccggctccgggaccgacttcaccctgaccattagccggctggagcctgaagatttcgccgtgtattactgccaacactacggaaactcgccgccaaagttcacgttcggacccggaaccaagctggaaatcaag

SEQ ID NO: 470 - DNA, 739 bp, Artificial Sequence
  source: /note="Description of Artificial Sequence: Synthetic polynucleotide"
gaagtccaactggtggagtccgggggagggctcgtgcagcccggaggcagccttcggctgtcgtgcgccgcctccgggttcacgttctcatcctacgcgatgtcgtgggtcagacaggcaccaggaaagggactggaatgggtgtccgccattagcggctccggcggtagcacctactatgccgactcagtgaagggaaggttcactatctcccgcgacaacagcaagaacaccctgtacctccaaatgaactctctgcgggccgaggataccgcggtgtactattgcgccaagatgggttggtccagcggatacttgggagccttcgacatttggggacagggcactactgtgaccgtgtcctccgggggtggcggatcgggaggcggcggctcgggtggagggggttccgaaatcgtgttgacccagtcaccgggaaccctctcgctgtccccgggagaacgggctacactgtcatgtagagcgtcccagtccgtggcttcctcgttcctggcctggtaccagcagaagccgggacaggcaccccgcctgctcatctacggagccagcggccgggcgaccggcatccctgaccgcttctccggttccggctcgggcaccgactttactctgaccattagcaggcttgagcccgaggattttgccgtgtactactgccaacactacggggggagccctcgcctgaccttcggaggcggaactaaggtcgatatcaaaa

SEQ ID NO: 471 - protein, 121 aa, Artificial Sequence
  source: /note="Description of Artificial Sequence: Synthetic polypeptide"
QVQLQESGPGLVKPSETLSLTCTVSGGSISSSYYYWGWIRQPPGKGLEWIGSIYYSGSAYYNPSLKSRVTISVDTSKNQFSLRLSSVTAADTAVYYCARHWQEWPDAFDIWGQGTMVTVSS

SEQ ID NO: 472 - protein, 123 aa, Artificial Sequence
  source: /note="Description of Artificial Sequence: Synthetic polypeptide"
QVNLRESGPALVKPTQTLTLTCTFSGFSLRTSGMCVSWIRQPPGKALEWLARIDWDEDKFYSTSLKTRLTISKDTSDNQVVLRMTNMDPADTATYYCARSGAGGTSATAFDIWGPGTMVTVSS

SEQ ID NO: 473 - protein, 119 aa, Artificial Sequence
  source: /note="Description of Artificial Sequence: Synthetic polypeptide"
EVQLVESGGGLVKPGGSLRLSCAASGFTFSSYSMNWVRQAPGKGLEWVSSISSSSSYIYYADSVKGRFTISRDNAKNSLYLQMNSLRAEDTAVYYCAKTIAAVYAFDIWGQGTTVTVSS

SEQ ID NO: 474 - protein, 117 aa, Artificial Sequence
  source: /note="Description of Artificial Sequence: Synthetic polypeptide"
EVQLVESGGGLVKPGGSLRLSCAASGFTFSDYYMSWIRQAPGKGLEWVSYISSSGSTIYYADSVKGRFTISRDNAKNSLYLQMNSLRAEDTAVYYCARDLRGAFDIWGQGTMVTVSS

SEQ ID NO: 475 - protein, 120 aa, Artificial Sequence
  source: /note="Description of Artificial Sequence: Synthetic polypeptide"
QVQLVQSGAEVKKPGASVKVSCKPSGYTVTSHYIHWVRRAPGQGLEWMGMINPSGGVTAYSQTLQGRVTMTSDTSSSTVYMELSSLRSEDTAMYYCAREGSGSGWYFDFWGRGTLVTVSS

SEQ ID NO: 476 - protein, 123 aa, Artificial Sequence
  source: /note="Description of Artificial Sequence: Synthetic polypeptide"
QVQLQESGPGLVKPSQTLSLTCTVSGGSISSGGYYWSWIRQHPGKGLEWIGYIYYSGSTYYNPSLKSRVTISVDTSKNQFSLKLSSVTAADTAVYYCARAGIAARLRGAFDIWGQGTMVTVSS

SEQ ID NO: 477 - protein, 129 aa, Artificial Sequence
  source: /note="Description of Artificial Sequence: Synthetic polypeptide"
QVQLVQSGAEVKKPGSSVKVSCKASGGTFSSYAISWVRQAPGQGLEWMGGIIPIFGTANYAQKFQGRVTITADESTSTAYMELSSLRSEDTAVYYCARRGGYQLLRWDVGLLRSAFDIWGQGTMVTVSS

SEQ ID NO: 478 - protein, 125 aa, Artificial Sequence
  source: /note="Description of Artificial Sequence: Synthetic polypeptide"
EVQLQQSGPGLVKPSQTLSLTCAISGDSVSSNSAAWNWIRQSPSRGLEWLGRTYYRSKWYSFYAISLKSRIIINPDTSKNQFSLQLKSVTPEDTAVYYCARSSPEGLFLYWFDPWGQGTLVTVSS

SEQ ID NO: 479 - protein, 118 aa, Artificial Sequence
  source: /note="Description of Artificial Sequence: Synthetic polypeptide"
EVQLVESGGGLVQPGGSLRLSCAASGFTFSSYAMSWVRQAPGKGLEWVSAISGSGGSTYYADSVKGRFTISRDNSKNTLYLQMNSLRAEDTAVYYCAKVEGSGSLDYWGQGTLVTVSS

SEQ ID NO: 480 - protein, 118 aa, Artificial Sequence
  source: /note="Description of Artificial Sequence: Synthetic polypeptide"
EVQLVETGGGLVQPGGSLRLSCAASGITFSRYPMSWVRQAPGKGLEWVSGISDSGVSTYYADSAKGRFTISRDNSKNTLFLQMSSLRDEDTAVYYCVTRAGSEASDIWGQGTMVTVSS

SEQ ID NO: 481 - protein, 124 aa, Artificial Sequence
  source: /note="Description of Artificial Sequence: Synthetic polypeptide"
QVQLVESGGGLVQPGGSLRLSCAASGFTFSSYAMSWVRQAPGKGLEWVSAISGSGGSTYYADSVKGRFTISRDNAKNSLYLQMNSLRAEDTAIYYCARATYKRELRYYYGMDVWGQGTMVTVSS

SEQ ID NO: 482 - protein, 124 aa, Artificial Sequence
  source: /note="Description of Artificial Sequence: Synthetic polypeptide"
EVQLVETGGGLVQPGGSLRLSCAASGFTFSSYAMSWVRQAPGKGLEWVSAISGSGGSTYYADSVKGRFTISRDNSKNTLYLQMNTLKAEDTAVYYCARATYKRELRYYYGMDVWGQGTTVTVSS

SEQ ID NO: 483 - protein, 117 aa, Artificial Sequence
  source: /note="Description of Artificial Sequence: Synthetic polypeptide"
EVQLVETGGGLVQPGRSLRLSCAASGFTFDDYAMHWVRQAPGKGLEWVSGISWNSGSIGYADSVKGRFTISRDNAKNSLYLQMNSLRDEDTAVYYCARVGKAVPDVWGQGTTVTVSS

SEQ ID NO: 484 - protein, 122 aa, Artificial Sequence
  source: /note="Description of Artificial Sequence: Synthetic polypeptide"
EVQLVESGGGLVQPGRSLRLSCTASGFTFDDYAMHWVRQRPGKGLEWVASINWKGNSLAYGDSVKGRFAISRDNAKNTVFLQMNSLRTEDTAVYYCASHQGVAYYNYAMDVWGRGTLVTVSS

SEQ ID NO: 485 - protein, 117 aa, Artificial Sequence
  source: /note="Description of Artificial Sequence: Synthetic polypeptide"
EVQLVESGGGLVQPGGSLRLSCAASGFTFSSYAMSWVRQAPGKGLEWVSAISGSGGSTYYADSVKGRFTISRDNSKNTLYLQMNSLRAEDTAVYYCAKVVRDGMDVWGQGTTVTVSS

SEQ ID NO: 486 - protein, 118 aa, Artificial Sequence
  source: /note="Description of Artificial Sequence: Synthetic polypeptide"
EVQLLESGGGLVQPGGSLRLSCAASGFTFSSYAMSWVRQAPGKGLEWVSAISGSGGSTYYADSVKGRFTISRDNSKNTLYLQMNSLRAEDTAVYYCAKIPQTGTFDYWGQGTLVTVSS

SEQ ID NO: 487 - protein, 124 aa, Artificial Sequence
  source: /note="Description of Artificial Sequence: Synthetic polypeptide"
EVQLVETGGGLVQPGGSLRLSCAASGFTFSSYAMSWVRQAPGKGLEWVSAISGSGGSTYYADSVKGRFTMSRENDKNSVFLQMNSLRVEDTGVYYCARANYKRELRYYYGMDVWGQGTMVTVSS

SEQ ID NO: 488 - protein, 120 aa, Artificial Sequence
  source: /note="Description of Artificial Sequence: Synthetic polypeptide"
EVQLLETGGGLVQPGGSLRLSCAASGFSFSSYAMSWVRQAPGKGLEWVSAISGSGGSTYYADSVKGRFTISRDNSKNTLYLQMNSLRAEDTAVYYCAKALVGATGAFDIWGQGTLVTVSS

SEQ ID NO: 489 - protein, 117 aa, Artificial Sequence
  source: /note="Description of Artificial Sequence: Synthetic polypeptide"
EVQLLESGGGLVQPGGSLRLSCAASGFTFSSYAMSWVRQAPGKGLEWVSAISGSGGSTYYADSVKGRFTISRDNSKNTLYLQMNSLRAEDTAVYYCVLWFGEGFDPWGQGTLVTVSS

SEQ ID NO: 490 - protein, 126 aa, Artificial Sequence
  source: /note="Description of Artificial Sequence: Synthetic polypeptide"
QVQLVESGGGLVQPGGSLRLSCAASGFTFSSYAMSWVRQAPGKGLEWVSAISGSGGSTYYADSVKGRFTISRDNSKNTLYLQMNSLRAEDTAVYYCAKVGYDSSGYYRDYYGMDVWGQGTTVTVSS

SEQ ID NO: 491 - protein, 122 aa, Artificial Sequence
  source: /note="Description of Artificial Sequence: Synthetic polypeptide"
EVQLVESGGGLVQPGGSLRLSCAASGFTFSSYAMSWVRQAPGKGLEWVSAISGSGGSTYYADSVKGRFTISRDNSKNTLYLQMNSLRAEDTAVYYCAKMGWSSGYLGAFDIWGQGTTVTVSS

SEQ ID NO: 492 - protein, 107 aa, Artificial Sequence
  source: /note="Description of Artificial Sequence: Synthetic polypeptide"
ETTLTQSPAFMSATPGDKVIISCKASQDIDDAMNWYQQKPGEAPLFIIQSATSPVPGIPPRFSGSGFGTDFSLTINNIESEDAAYYFCLQHDNFPLTFGQGTKLEIK

SEQ ID NO: 493 - protein, 107 aa, Artificial Sequence
  source: /note="Description of Artificial Sequence: Synthetic polypeptide"
DIQMTQSPSSLSASVGDRVTITCRASQDIYNNLAWFQLKPGSAPRSLMYAANKSQSGVPSRFSGSASGTDFTLTISSLQPEDFATYYCQHYYRFPYSFGQGTKLEIK

SEQ ID NO: 494 - protein, 112 aa, Artificial Sequence
  source: /note="Description of Artificial Sequence: Synthetic polypeptide"
EIVLTQSPLSLPVTPEEPASISCRSSQSLLHSNGYNYLDWYLQKPGQSPQLLIYLGSNRASGVPDRFSGSGSGTDFTLKISRVEAEDVGVYYCMQALQTPYTFGQGTKLEIK

SEQ ID NO: 495 - protein, 108 aa, Artificial Sequence
  source: /note="Description of Artificial Sequence: Synthetic polypeptide"
SYVLTQSPSVSAAPGYTATISCGGNNIGTKSVHWYQQKPGQAPLLVIRDDSVRPSKIPGRFSGSNSGNMATLTISGVQAGDEADFYCQVWDSDSEHVVFGGGTKLTVL

SEQ ID NO: 496 - protein, 106 aa, Artificial Sequence
  source: /note="Description of Artificial Sequence: Synthetic polypeptide"
SYVLTQPPSVSVSPGQTASITCSGDGLSKKYVSWYQQKAGQSPVVLISRDKERPSGIPDRFSGSNSADTATLTISGTQAMDEADYYCQAWDDTTVVFGGGTKLTVL

SEQ ID NO: 497 - protein, 107 aa, Artificial Sequence
  source: /note="Description of Artificial Sequence: Synthetic polypeptide"
DIVMTQSPSSVSASVGDRVIITCRASQGIRNWLAWYQQKPGKAPNLLIYAASNLQSGVPSRFSGSGSGADFTLTISSLQPEDVATYYCQKYNSAPFTFGPGTKVDIK

SEQ ID NO: 498 - protein, 109 aa, Artificial Sequence
  source: /note="Description of Artificial Sequence: Synthetic polypeptide"
SYVLTQPPSVSVAPGQTARITCGGNNIGSKSVHWYQQKPGQAPVLVLYGKNNRPSGVPDRFSGSRSGTTASLTITGAQAEDEADYYCSSRDSSGDHLRVFGTGTKVTVL

SEQ ID NO: 499 - protein, 108 aa, Artificial Sequence
  source: /note="Description of Artificial Sequence: Synthetic polypeptide"
SSELTQDPAVSVALGQTIRITCQGDSLGNYYATWYQQKPGQAPVLVIYGTNNRPSGIPDRFSASSSGNTASLTITGAQAEDEADYYCNSRDSSGHHLLFGTGTKVTVL

SEQ ID NO: 500 - protein, 113 aa, Artificial Sequence
  source: /note="Description of Artificial Sequence: Synthetic polypeptide"
EIVMTQSPGTLSLSPGERATLSCRASQSVSSAYLAWYQQKPGQPPRLLISGASTRATGIPDRFGGSGSGTDFTLTISRLEPEDFAVYYCQHYGSSFNGSSLFTFGQGTRLEIK

SEQ ID NO: 501 - protein, 108 aa, Artificial Sequence
  source: /note="Description of Artificial Sequence: Synthetic polypeptide"
EIVLTQSPATLSLSPGERATLSCRASQSVSNSLAWYQQKPGQAPRLLIYDASSRATGIPDRFSGSGSGTDFTLTISRLEPEDFAIYYCQQFGTSSGLTFGGGTKLEIK

SEQ ID NO: 502 - protein, 109 aa, Artificial Sequence
  source: /note="Description of Artificial Sequence: Synthetic polypeptide"
EIVMTQSPGTVSLSPGERATLSCRASQSVSSSFLAWYQQKPGQAPRLLIYGASSRATGIPDRFSGSGSGTDFTLTISRLEPEDSAVYYCQQYHSSPSWTFGQGTRLEIK

SEQ ID NO: 503 - protein, 109 aa, Artificial Sequence
  source: /note="Description of Artificial Sequence: Synthetic polypeptide"
EIVLTQSPSTLSLSPGESATLSCRASQSVSTTFLAWYQQKPGQAPRLLIYGSSNRATGIPDRFSGSGSGTDFTLTIRRLEPEDFAVYYCQQYHSSPSWTFGQGTKVEIK

SEQ ID NO: 504 - protein, 107 aa, Artificial Sequence
  source: /note="Description of Artificial Sequence: Synthetic polypeptide"
DIVMTQTPSSLSASVGDRVTITCRASQSISSYLNWYQQKPGKAPKLLIYAASSLQSGVPSRFSGSGSGTDFTLTISSLQPEDFATYYCQQSYSTPYSFGQGTRLEIK

SEQ ID NO: 505 - protein, 109 aa, Artificial Sequence
  source: /note="Description of Artificial Sequence: Synthetic polypeptide"
EIVLTQSPGTLSLSPGERATLSCRATQSIGSSFLAWYQQRPGQAPRLLIYGASQRATGIPDRFSGRGSGTDFTLTISRVEPEDSAVYYCQHYESSPSWTFGQGTKVEIK

SEQ ID NO: 506 - protein, 109 aa, Artificial Sequence
  source: /note="Description of Artificial Sequence: Synthetic polypeptide"
EIVLTQSPATLSLSPGERATLSCRASQSVSSSYLAWYQQKPGQAPRLLIYGASSRATGIPDRFSGNGSGTDFTLTISRLEPEDFAVYYCQQYGSPPRFTFGPGTKVDIK

SEQ ID NO: 507 - protein, 109 aa, Artificial Sequence
  source: /note="Description of Artificial Sequence: Synthetic polypeptide"
EIVLTQSPGTLSLSPGERATLSCRASQSVSSSYLAWYQQRPGQAPRLLIYGASSRATGIPDRFSGSGSGTDFTLTISRLEPEDFAVYYCQHYGSSPSWTFGQGTRLEIK

SEQ ID NO: 508 - protein, 109 aa, Artificial Sequence
  source: /note="Description of Artificial Sequence: Synthetic polypeptide"
EIVMTQSPGTLSLSPGESATLSCRASQRVASNYLAWYQHKPGQAPSLLISGASSRATGVPDRFSGSGSGTDFTLAISRLEPEDSAVYYCQHYDSSPSWTFGQGTKVEIK

SEQ ID NO: 509 - protein, 109 aa, Artificial Sequence
  source: /note="Description of Artificial Sequence: Synthetic polypeptide"
EIVLTQSPGTLSLSPGERATLSCRASQSLSSNFLAWYQQKPGQAPGLLIYGASNWATGTPDRFSGSGSGTDFTLTITRLEPEDFAVYYCQYYGTSPMYTFGQGTKVEIK

SEQ ID NO: 510 - protein, 112 aa, Artificial Sequence
  source: /note="Description of Artificial Sequence: Synthetic polypeptide"
DIVLTQSPLSLPVTPGEPASISCRSSQSLLHSNGYNYLDWYLQKPGQSPQLLIYLGSNRASGVPDRFSGSGSGTDFTLKISRVEAEDVGVYYCMQALQTPLTFGGGTKVDIK

SEQ ID NO: 511 - protein, 110 aa, Artificial Sequence
  source: /note="Description of Artificial Sequence: Synthetic polypeptide"
EIVLTQSPGTLSLSPGERATLSCRASQSVSSSYLAWYQQKPGQAPRLLIYGTSSRATGISDRFSGSGSGTDFTLTISRLEPEDFAVYYCQHYGNSPPKFTFGPGTKLEIK

SEQ ID NO: 512 - protein, 109 aa, Artificial Sequence
  source: /note="Description of Artificial Sequence: Synthetic polypeptide"
EIVLTQSPGTLSLSPGERATLSCRASQSVASSFLAWYQQKPGQAPRLLIYGASGRATGIPDRFSGSGSGTDFTLTISRLEPEDFAVYYCQHYGGSPRLTFGGGTKVDIK

SEQ ID NO: 513-554 - skipped (42 entries)

SEQ ID NO: 555 - protein, 122 aa, Artificial Sequence
  source: /note="Description of Artificial Sequence: Synthetic polypeptide"
QIQLVQSGPDLKKPGETVKLSCKASGYTFTNFGMNWVKQAPGKGFKWMAWINTYTGESYFADDFKGRFAFSVETSATTAYLQINNLKTEDTATYFCARGEIYYGYDGGFAYWGQGTLVTVSA

SEQ ID NO: 556 - protein, 117 aa, Artificial Sequence
  source: /note="Description of Artificial Sequence: Synthetic polypeptide"
QIQLVQSGPELKKPGETVKISCKASGYTFTDYSINWVKRAPGKGLKWMGWINTETREPAYAYDFRGRFAFSLETSASTAYLQINNLKYEDTATYFCALDYSYAMDYWGQGTSVTVSS

SEQ ID NO: 557 - protein, 117 aa, Artificial Sequence
  source: /note="Description of Artificial Sequence: Synthetic polypeptide"
QIQLVQSGPELKKPGETVKISCKASGYTFRHYSMNWVKQAPGKGLKWMGRINTESGVPIYADDFKGRFAFSVETSASTAYLVINNLKDEDTASYFCSNDYLYSLDFWGQGTALTVSS

SEQ ID NO: 558 - protein, 117 aa, Artificial Sequence
  source: /note="Description of Artificial Sequence: Synthetic polypeptide"
QIQLVQSGPELKKPGETVKISCKASGYTFTHYSMNWVKQAPGKGLKWMGRINTETGEPLYADDFKGRFAFSLETSASTAYLVINNLKNEDTATFFCSNDYLYSCDYWGQGTTLTVSS

SEQ ID NO: 559 - protein, 107 aa, Artificial Sequence
  source: /note="Description of Artificial Sequence: Synthetic polypeptide"
DVVMTQSHRFMSTSVGDRVSITCRASQDVNTAVSWYQQKPGQSPKLLIFSASYRYTGVPDRFTGSGSGADFTLTISSVQAEDLAVYYCQQHYSTPWTFGGGTKLDIK

SEQ ID NO: 560 - protein, 111 aa, Artificial Sequence
  source: /note="Description of Artificial Sequence: Synthetic polypeptide"
DIVLTQSPASLAMSLGKRATISCRASESVSVIGAHLIHWYQQKPGQPPKLLIYLASNLETGVPARFSGSGSGTDFTLTIDPVEEDDVAIYSCLQSRIFPRTFGGGTKLEIK

SEQ ID NO: 561 - protein, 111 aa, Artificial Sequence
  source: /note="Description of Artificial Sequence: Synthetic polypeptide"
DIVLTQSPPSLAMSLGKRATISCRASESVTILGSHLIYWYQQKPGQPPTLLIQLASNVQTGVPARFSGSGSRTDFTLTIDPVEEDDVAVYYCLQSRTIPRTFGGGTKLEIK

SEQ ID NO: 562 - protein, 111 aa, Artificial Sequence; identical to SEQ ID NO: 561
  source: /note="Description of Artificial Sequence: Synthetic polypeptide"

SEQ ID NO: 563 - protein, 244 aa, Artificial Sequence
  source: /note="Description of Artificial Sequence: Synthetic polypeptide"
QIQLVQSGPDLKKPGETVKLSCKASGYTFTNFGMNWVKQAPGKGFKWMAWINTYTGESYFADDFKGRFAFSVETSATTAYLQINNLKTEDTATYFCARGEIYYGYDGGFAYWGQGTLVTVSAGGGGSGGGGSGGGGSDVVMTQSHRFMSTSVGDRVSITCRASQDVNTAVSWYQQKPGQSPKLLIFSASYRYTGVPDRFTGSGSGADFTLTISSVQAEDLAVYYCQQHYSTPWTFGGGTKLDIK

SEQ ID NO: 564 - protein, 249 aa, Artificial Sequence
  source: /note="Description of Artificial Sequence: Synthetic polypeptide"
QIQLVQSGPELKKPGETVKISCKASGYTFTDYSINWVKRAPGKGLKWMGWINTETREPAYAYDFRGRFAFSLETSASTAYLQINNLKYEDTATYFCALDYSYAMDYWGQGTSVTVSSGGGGSGGGGSGGGGSQIQLVQSGPELKKPGETVKISCKASGYTFTDYSINWVKRAPGKGLKWMGWINTETREPAYAYDFRGRFAFSLETSASTAYLQINNLKYEDTATYFCALDYSYAMDYWGQGTSVTVSS

SEQ ID NO: 565 - protein, 243 aa, Artificial Sequence
  source: /note="Description of Artificial Sequence: Synthetic polypeptide"
QIQLVQSGPELKKPGETVKISCKASGYTFRHYSMNWVKQAPGKGLKWMGRINTESGVPIYADDFKGRFAFSVETSASTAYLVINNLKDEDTASYFCSNDYLYSLDFWGQGTALTVSSGGGGSGGGGSGGGGSDIVLTQSPPSLAMSLGKRATISCRASESVTILGSHLIYWYQQKPGQPPTLLIQLASNVQTGVPARFSGSGSRTDFTLTIDPVEEDDVAVYYCLQSRTIPRTFGGGTKLEIK

SEQ ID NO: 566 - protein, 243 aa, Artificial Sequence
  source: /note="Description of Artificial Sequence: Synthetic polypeptide"
QIQLVQSGPELKKPGETVKISCKASGYTFTHYSMNWVKQAPGKGLKWMGRINTETGEPLYADDFKGRFAFSLETSASTAYLVINNLKNEDTATFFCSNDYLYSCDYWGQGTTLTVSSGGGGSGGGGSGGGGSDIVLTQSPPSLAMSLGKRATISCRASESVTILGSHLIYWYQQKPGQPPTLLIQLASNVQTGVPARFSGSGSRTDFTLTIDPVEEDDVAVYYCLQSRTIPRTFGGGTKLEIK

SEQ ID NO: 567-683 - skipped (117 entries)

SEQ ID NO: 684 - protein, 5 aa, Artificial Sequence
  source: /note="Description of Artificial Sequence: Synthetic peptide"
NYAMS

SEQ ID NO: 685 - protein, 5 aa, Artificial Sequence
  source: /note="Description of Artificial Sequence: Synthetic peptide"
DYAMH

SEQ ID NO: 686 - protein, 5 aa, Artificial Sequence
  source: /note="Description of Artificial Sequence: Synthetic peptide"
NHGMS

SEQ ID NO: 687 - protein, 5 aa, Artificial Sequence
  source: /note="Description of Artificial Sequence: Synthetic peptide"
NFGIN

SEQ ID NO: 688 - protein, 5 aa, Artificial Sequence
  source: /note="Description of Artificial Sequence: Synthetic peptide"
SDAMT

SEQ ID NO: 689 - protein, 5 aa, Artificial Sequence
  source: /note="Description of Artificial Sequence: Synthetic peptide"
NYGIT

SEQ ID NO: 690 - protein, 5 aa, Artificial Sequence
  source: /note="Description of Artificial Sequence: Synthetic peptide"
NHGMS

SEQ ID NO: 691 - protein, 5 aa, Artificial Sequence
  source: /note="Description of Artificial Sequence: Synthetic peptide"
NHGMS

SEQ ID NO: 692 - protein, 5 aa, Artificial Sequence
  source: /note="Description of Artificial Sequence: Synthetic peptide"
NHGMS

SEQ ID NO: 693 - protein, 5 aa, Artificial Sequence
  source: /note="Description of Artificial Sequence: Synthetic peptide"
DYYMS

SEQ ID NO: 694 - protein, 5 aa, Artificial Sequence
  source: /note="Description of Artificial Sequence: Synthetic peptide"
NHGMS

SEQ ID NO: 695 - protein, 5 aa, Artificial Sequence
  source: /note="Description of Artificial Sequence: Synthetic peptide"
DYYMS

SEQ ID NO: 696 - protein, 5 aa, Artificial Sequence
  source: /note="Description of Artificial Sequence: Synthetic peptide"
NHGMS

SEQ ID NO: 697 - protein, 5 aa, Artificial Sequence
  source: /note="Description of Artificial Sequence: Synthetic peptide"
NHGMS

SEQ ID NO: 698 - protein, 5 aa, Artificial Sequence
  source: /note="Description of Artificial Sequence: Synthetic peptide"
NHGMS

SEQ ID NO: 699 - protein, 7 aa, Artificial Sequence
  source: /note="Description of Artificial Sequence: Synthetic peptide"
SSYYYWG

SEQ ID NO: 700 - protein, 7 aa, Artificial Sequence
  source: /note="Description of Artificial Sequence: Synthetic peptide"
TSGMCVS

SEQ ID NO: 701 - protein, 5 aa, Artificial Sequence
  source: /note="Description of Artificial Sequence: Synthetic peptide"
SYSMN

SEQ ID NO: 702 - protein, 5 aa, Artificial Sequence
  source: /note="Description of Artificial Sequence: Synthetic peptide"
DYYMS

SEQ ID NO: 703 - protein, 5 aa, Artificial Sequence
  source: /note="Description of Artificial Sequence: Synthetic peptide"
SHYIH

SEQ ID NO: 704 - protein, 7 aa, Artificial Sequence
  source: /note="Description of Artificial Sequence: Synthetic peptide"
SGGYYWS

SEQ ID NO: 705 - protein, 5 aa, Artificial Sequence
  source: /note="Description of Artificial Sequence: Synthetic peptide"
SYAIS

SEQ ID NO: 706 - protein, 7 aa, Artificial Sequence
  source: /note="Description of Artificial Sequence: Synthetic peptide"
SNSAAWN

SEQ ID NO: 707 - protein, 5 aa, Artificial Sequence
  source: /note="Description of Artificial Sequence: Synthetic peptide"
SYAMS

SEQ ID NO: 708 - protein, 5 aa, Artificial Sequence
  source: /note="Description of Artificial Sequence: Synthetic peptide"
RYPMS

SEQ ID NO: 709 - protein, 5 aa, Artificial Sequence
  source: /note="Description of Artificial Sequence: Synthetic peptide"
SYAMS

SEQ ID NO: 710 - protein, 5 aa, Artificial Sequence
  source: /note="Description of Artificial Sequence: Synthetic peptide"
SYAMS

SEQ ID NO: 711 - protein, 5 aa, Artificial Sequence
  source: /note="Description of Artificial Sequence: Synthetic peptide"
DYAMH

SEQ ID NO: 712 - protein, 5 aa, Artificial Sequence
  source: /note="Description of Artificial Sequence: Synthetic peptide"
DYAMH

SEQ ID NO: 713 - protein, 5 aa, Artificial Sequence
  source: /note="Description of Artificial Sequence: Synthetic peptide"
SYAMS

SEQ ID NO: 714 - protein, 5 aa, Artificial Sequence
  source: /note="Description of Artificial Sequence: Synthetic peptide"
SYAMS

SEQ ID NO: 715 - protein, 5 aa, Artificial Sequence
  source: /note="Description of Artificial Sequence: Synthetic peptide"
SYAMS

SEQ ID NO: 716 - protein, 5 aa, Artificial Sequence
  source: /note="Description of Artificial Sequence: Synthetic peptide"
SYAMS

SEQ ID NO: 717 - protein, 5 aa, Artificial Sequence
  source: /note="Description of Artificial Sequence: Synthetic peptide"
SYAMS

SEQ ID NO: 718 - protein, 5 aa, Artificial Sequence
  source: /note="Description of Artificial Sequence: Synthetic peptide"
SYAMS

SEQ ID NO: 719 - protein, 5 aa, Artificial Sequence
  source: /note="Description of Artificial Sequence: Synthetic peptide"
SYAMS

SEQ ID NO: 720 - protein, 5 aa, Artificial Sequence
  source: /note="Description of Artificial Sequence: Synthetic peptide"
NFGMN

SEQ ID NO: 721 - protein, 5 aa, Artificial Sequence
  source: /note="Description of Artificial Sequence: Synthetic peptide"
DYSIN

SEQ ID NO: 722 - protein, 5 aa, Artificial Sequence
  source: /note="Description of Artificial Sequence: Synthetic peptide"
HYSMN

SEQ ID NO: 723 - protein, 5 aa, Artificial Sequence
  source: /note="Description of Artificial Sequence: Synthetic peptide"
HYSMN

SEQ ID NO: 724 - protein, 17 aa, Artificial Sequence
  source: /note="Description of Artificial Sequence: Synthetic peptide"
GISRSGENTYYADSVKG

SEQ ID NO: 725 - protein, 17 aa, Artificial Sequence
  source: /note="Description of Artificial Sequence: Synthetic peptide"
GISWNSGSIGYADSVKG

SEQ ID NO: 726 - protein, 16 aa, Artificial Sequence
  source: /note="Description of Artificial Sequence: Synthetic peptide"
GIVYSGSTYYAASVKG

SEQ ID NO: 727 - protein, 17 aa, Artificial Sequence
  source: /note="Description of Artificial Sequence: Synthetic peptide"
WINPKNNNTNYAQKFQG

SEQ ID NO: 728 - protein, 17 aa, Artificial Sequence
  source: /note="Description of Artificial Sequence: Synthetic peptide"
VISGSGGTTYYADSVKG

SEQ ID NO: 729 - protein, 17 aa, Artificial Sequence
  source: /note="Description of Artificial Sequence: Synthetic peptide"
WISAYNGNTNYAQKFQG

SEQ ID NO: 730 - protein, 16 aa, Artificial Sequence
  source: /note="Description of Artificial Sequence: Synthetic peptide"
GIVYSGSTYYAASVKG

SEQ ID NO: 731 - protein, 16 aa, Artificial Sequence
  source: /note="Description of Artificial Sequence: Synthetic peptide"
GIVYSGSTYYAASVKG

SEQ ID NO: 732 - protein, 16 aa, Artificial Sequence
  source: /note="Description of Artificial Sequence: Synthetic peptide"
GIVYSGSTYYAASVKG

SEQ ID NO: 733 - protein, 17 aa, Artificial Sequence
  source: /note="Description of Artificial Sequence: Synthetic peptide"
YISSSGSTIYYADSVKG

SEQ ID NO: 734 - protein, 16 aa, Artificial Sequence
  source: /note="Description of Artificial Sequence: Synthetic peptide"
GIVYSGSTYYAASVKG

SEQ ID NO: 735 - protein, 17 aa, Artificial Sequence
  source: /note="Description of Artificial Sequence: Synthetic peptide"
YISSSGNTIYYADSVKG

SEQ ID NO: 736 - protein, 16 aa, Artificial Sequence
  source: /note="Description of Artificial Sequence: Synthetic peptide"
GIVYSGSTYYAASVKG

SEQ ID NO: 737 - protein, 16 aa, Artificial Sequence
  source: /note="Description of Artificial Sequence: Synthetic peptide"
GIVYSGSTYYAASVKG

SEQ ID NO: 738 - protein, 16 aa, Artificial Sequence
  source: /note="Description of Artificial Sequence: Synthetic peptide"
GIVYSGSTYYAASVKG

SEQ ID NO: 739 - protein, 16 aa, Artificial Sequence
  source: /note="Description of Artificial Sequence: Synthetic peptide"
SIYYSGSAYYNPSLKS

SEQ ID NO: 740 - protein, 16 aa, Artificial Sequence
  source: /note="Description of Artificial Sequence: Synthetic peptide"
RIDWDEDKFYSTSLKT

SEQ ID NO: 741 - protein, 17 aa, Artificial Sequence
  source: /note="Description of Artificial Sequence: Synthetic peptide"
SISSSSSYIYYADSVKG

SEQ ID NO: 742 - protein, 17 aa, Artificial Sequence
  source: /note="Description of Artificial Sequence: Synthetic peptide"
YISSSGSTIYYADSVKG

SEQ ID NO: 743 - protein, 17 aa, Artificial Sequence
  source: /note="Description of Artificial Sequence: Synthetic peptide"
MINPSGGVTAYSQTLQG

SEQ ID NO: 744 - protein, 16 aa, Artificial Sequence
  source: /note="Description of Artificial Sequence: Synthetic peptide"
YIYYSGSTYYNPSLKS

SEQ ID NO: 745 - protein, 17 aa, Artificial Sequence
  source: /note="Description of Artificial Sequence: Synthetic peptide"
GIIPIFGTANYAQKFQG

SEQ ID NO: 746 - protein, 18 aa, Artificial Sequence
  source: /note="Description of Artificial Sequence: Synthetic peptide"
RTYYRSKWYSFYAISLKS

SEQ ID NO: 747 - protein, 17 aa, Artificial Sequence
  source: /note="Description of Artificial Sequence: Synthetic peptide"
AISGSGGSTYYADSVKG

SEQ ID NO: 748 - protein, 17 aa, Artificial Sequence
  source: /note="Description of Artificial Sequence: Synthetic peptide"
GISDSGVSTYYADSAKG

SEQ ID NO: 749 - protein, 17 aa, Artificial Sequence
  source: /note="Description of Artificial Sequence: Synthetic peptide"
AISGSGGSTYYADSVKG

SEQ ID NO: 750 - protein, 17 aa, Artificial Sequence
  source: /note="Description of Artificial Sequence: Synthetic peptide"
AISGSGGSTYYADSVKG

SEQ ID NO: 751 - protein, 17 aa, Artificial Sequence
  source: /note="Description of Artificial Sequence: Synthetic peptide"
GISWNSGSIGYADSVKG

SEQ ID NO: 752 - protein, 17 aa, Artificial Sequence
  source: /note="Description of Artificial Sequence: Synthetic peptide"
SINWKGNSLAYGDSVKG

SEQ ID NO: 753 - protein, 17 aa, Artificial Sequence
  source: /note="Description of Artificial Sequence: Synthetic peptide"
AISGSGGSTYYADSVKG

SEQ ID NO: 754 - protein, 17 aa, Artificial Sequence
  source: /note="Description of Artificial Sequence: Synthetic peptide"
AISGSGGSTYYADSVKG

SEQ ID NO: 755 - protein, 17 aa, Artificial Sequence
  source: /note="Description of Artificial Sequence: Synthetic peptide"
AISGSGGSTYYADSVKG

SEQ ID NO: 756 - protein, 17 aa, Artificial Sequence
  source: /note="Description of Artificial Sequence: Synthetic peptide"
AISGSGGSTYYADSVKG

SEQ ID NO: 757 - protein, 17 aa, Artificial Sequence
  source: /note="Description of Artificial Sequence: Synthetic peptide"
AISGSGGSTYYADSVKG

SEQ ID NO: 758 - protein, 17 aa, Artificial Sequence
  source: /note="Description of Artificial Sequence: Synthetic peptide"
AISGSGGSTYYADSVKG

SEQ ID NO: 759 - protein, 17 aa, Artificial Sequence
  source: /note="Description of Artificial Sequence: Synthetic peptide"
AISGSGGSTYYADSVKG

SEQ ID NO: 760 - protein, 17 aa, Artificial Sequence
  source: /note="Description of Artificial Sequence: Synthetic peptide"
WINTYTGESYFADDFKG

SEQ ID NO: 761 - protein, 17 aa, Artificial Sequence
  source: /note="Description of Artificial Sequence: Synthetic peptide"
WINTETREPAYAYDFRG

SEQ ID NO: 762 - protein, 17 aa, Artificial Sequence
  source: /note="Description of Artificial Sequence: Synthetic peptide"
RINTESGVPIYADDFKG

SEQ ID NO: 763 - protein, 17 aa, Artificial Sequence
  source: /note="Description of Artificial Sequence: Synthetic peptide"
RINTETGEPLYADDFKG

SEQ ID NO: 764 - protein, 11 aa, Artificial Sequence
  source: /note="Description of Artificial Sequence: Synthetic peptide"
SPAHYYGGMDV

SEQ ID NO: 765 - protein, 6 aa, Artificial Sequence
  source: /note="Description of Artificial Sequence: Synthetic peptide"
HSFLAY

SEQ ID NO: 766 - protein, 7 aa, Artificial Sequence
  source: /note="Description of Artificial Sequence: Synthetic peptide"
HGGESDV

SEQ ID NO: 767 - protein, 11 aa, Artificial Sequence
  source: /note="Description of Artificial Sequence: Synthetic peptide"
GPYYYQSYMDV

SEQ ID NO: 768 - protein, 14 aa, Artificial Sequence
  source: /note="Description of Artificial Sequence: Synthetic peptide"
LDSSGYYYARGPRY

SEQ ID NO: 769 - protein, 9 aa, Artificial Sequence
  source: /note="Description of Artificial Sequence: Synthetic peptide"
GPYYYYMDV

SEQ ID NO: 770 - protein, 7 aa, Artificial Sequence
  source: /note="Description of Artificial Sequence: Synthetic peptide"
HGGESDV

SEQ ID NO: 771 - protein, 7 aa, Artificial Sequence
  source: /note="Description of Artificial Sequence: Synthetic peptide"
HGGESDV

SEQ ID NO: 772 - protein, 7 aa, Artificial Sequence
  source: /note="Description of Artificial Sequence: Synthetic peptide"
HGGESDV

SEQ ID NO: 773 - protein, 8 aa, Artificial Sequence
  source: /note="Description of Artificial Sequence: Synthetic peptide"
ESGDGMDV

SEQ ID NO: 774 - protein, 7 aa, Artificial Sequence
  source: /note="Description of Artificial Sequence: Synthetic peptide"
HGGESDV

SEQ ID NO: 775 - protein, 8 aa, Artificial Sequence
  source: /note="Description of Artificial Sequence: Synthetic peptide"
STMVREDY

SEQ ID NO: 776 - protein, 7 aa, Artificial Sequence
  source: /note="Description of Artificial Sequence: Synthetic peptide"
HGGESDV

SEQ ID NO: 777 - protein, 7 aa, Artificial Sequence
  source: /note="Description of Artificial Sequence: Synthetic peptide"
HGGESDV

SEQ ID NO: 778 - protein, 7 aa, Artificial Sequence
  source: /note="Description of Artificial Sequence: Synthetic peptide"
HGGESDV

SEQ ID NO: 779 - protein, 11 aa, Artificial Sequence
  source: /note="Description of Artificial Sequence: Synthetic peptide"
HWQEWPDAFDI

SEQ ID NO: 780 - protein, 13 aa, Artificial Sequence
  source: /note="Description of Artificial Sequence: Synthetic peptide"
SGAGGTSATAFDI

SEQ ID NO: 781 - protein, 10 aa, Artificial Sequence
  source: /note="Description of Artificial Sequence: Synthetic peptide"
TIAAVYAFDI

SEQ ID NO: 782 - protein, 8 aa, Artificial Sequence
  source: /note="Description of Artificial Sequence: Synthetic peptide"
DLRGAFDI

SEQ ID NO: 783 - protein, 11 aa, Artificial Sequence
  source: /note="Description of Artificial Sequence: Synthetic peptide"
EGSGSGWYFDF

SEQ ID NO: 784 - protein, 13 aa, Artificial Sequence
  source: /note="Description of Artificial Sequence: Synthetic peptide"
AGIAARLRGAFDI

SEQ ID NO: 785 - protein, 20 aa, Artificial Sequence
  source: /note="Description of Artificial Sequence: Synthetic peptide"
RGGYQLLRWDVGLLRSAFDI

SEQ ID NO: 786 - protein, 13 aa, Artificial Sequence
  source: /note="Description of Artificial Sequence: Synthetic peptide"
SSPEGLFLYWFDP

SEQ ID NO: 787 - protein, 9 aa, Artificial Sequence
  source: /note="Description of Artificial Sequence: Synthetic peptide"
VEGSGSLDY

SEQ ID NO: 788 - protein, 9 aa, Artificial Sequence
  source: /note="Description of Artificial Sequence: Synthetic peptide"
RAGSEASDI

SEQ ID NO: 789 - protein, 15 aa, Artificial Sequence
  source: /note="Description of Artificial Sequence: Synthetic peptide"
ATYKRELRYYYGMDV

SEQ ID NO: 790 - protein, 15 aa, Artificial Sequence
  source: /note="Description of Artificial Sequence: Synthetic peptide"
ATYKRELRYYYGMDV

SEQ ID NO: 791 - protein, 8 aa, Artificial Sequence
  source: /note="Description of Artificial Sequence: Synthetic peptide"
VGKAVPDV

SEQ ID NO: 792 - protein, 13 aa, Artificial Sequence
  source: /note="Description of Artificial Sequence: Synthetic peptide"
HQGVAYYNYAMDV

SEQ ID NO: 793 - protein, 8 aa, Artificial Sequence
  source: /note="Description of Artificial Sequence: Synthetic peptide"
VVRDGMDV

SEQ ID NO: 794 - protein, 9 aa, Artificial Sequence
  source: /note="Description of Artificial Sequence: Synthetic peptide"
IPQTGTFDY

SEQ ID NO: 795 - protein, 15 aa, Artificial Sequence
  source: /note="Description of Artificial Sequence: Synthetic peptide"
ANYKRELRYYYGMDV

SEQ ID NO: 796 - protein, 11 aa, Artificial Sequence
  source: /note="Description of Artificial Sequence: Synthetic peptide"
ALVGATGAFDI

SEQ ID NO: 797 - protein, 8 aa, Artificial Sequence
  source: /note="Description of Artificial Sequence: Synthetic peptide"
WFGEGFDP

SEQ ID NO: 798 - protein, 17 aa, Artificial Sequence
  source: /note="Description of Artificial Sequence: Synthetic peptide"
VGYDSSGYYRDYYGMDV

SEQ ID NO: 799 - protein, 13 aa, Artificial Sequence
  source: /note="Description of Artificial Sequence: Synthetic peptide"
MGWSSGYLGAFDI

SEQ ID NO: 800 - protein, 13 aa, Artificial Sequence
  source: /note="Description of Artificial Sequence: Synthetic peptide"
GEIYYGYDGGFAY

SEQ ID NO: 801 - protein, 8 aa, Artificial Sequence
  source: /note="Description of Artificial Sequence: Synthetic peptide"
DYSYAMDY

SEQ ID NO: 802 - protein, 8 aa, Artificial Sequence
  source: /note="Description of Artificial Sequence: Synthetic peptide"
DYLYSLDF

SEQ ID NO: 803 - protein, 8 aa, Artificial Sequence
  source: /note="Description of Artificial Sequence: Synthetic peptide"
DYLYSCDY

SEQ ID NO: 804 - protein, 12 aa, Artificial Sequence
  source: /note="Description of Artificial Sequence: Synthetic peptide"
RASQSISSSFLA

SEQ ID NO: 805 - protein, 16 aa, Artificial Sequence
  source: /note="Description of Artificial Sequence: Synthetic peptide"
RSSQSLLHSNGYNYLD

SEQ ID NO: 806 - protein, 16 aa, Artificial Sequence
  source: /note="Description of Artificial Sequence: Synthetic peptide"
KSSQSLLRNDGKTPLY

SEQ ID NO: 807 - protein, 16 aa, Artificial Sequence
  source: /note="Description of Artificial Sequence: Synthetic peptide"
RSSQSLLHSNGYNYLN

SEQ ID NO: 808 - protein, 11 aa, Artificial Sequence
  source: /note="Description of Artificial Sequence: Synthetic peptide"
RASQSISSYLN

SEQ ID NO: 809 - protein, 16 aa, Artificial Sequence
  source: /note="Description of Artificial Sequence: Synthetic peptide"
RSSQSLLYSNGYNYVD

SEQ ID NO: 810 - protein, 11 aa, Artificial Sequence
  source: /note="Description of Artificial Sequence: Synthetic peptide"
RASQSVSSNLA

SEQ ID NO: 811 - protein, 11 aa, Artificial Sequence
  source: /note="Description of Artificial Sequence: Synthetic peptide"
RASQSVSSKLA

SEQ ID NO: 812 - protein, 12 aa, Artificial Sequence
  source: /note="Description of Artificial Sequence: Synthetic peptide"
RASQSVGSTNLA

SEQ ID NO: 813 - protein, 11 aa, Artificial Sequence
  source: /note="Description of Artificial Sequence: Synthetic peptide"
RASQSISSYLN

SEQ ID NO: 814 - protein, 11 aa, Artificial Sequence
  source: /note="Description of Artificial Sequence: Synthetic peptide"
RASQSISSYLN

SEQ ID NO: 815 - protein, 16 aa, Artificial Sequence
  source: /note="Description of Artificial Sequence: Synthetic peptide"
KSSESLVHNSGKTYLN

SEQ ID NO: 816 - protein, 11 aa, Artificial Sequence
  source: /note="Description of Artificial Sequence: Synthetic peptide"
QASEDINKFLN

SEQ ID NO: 817 - protein, 11 aa, Artificial Sequence
  source: /note="Description of Artificial Sequence: Synthetic peptide"
RASQSVGSNLA

SEQ ID NO: 818 - protein, 12 aa, Artificial Sequence
  source: /note="Description of Artificial Sequence: Synthetic peptide"
RASQSIGSSSLA

SEQ ID NO: 819 - protein, 11 aa, Artificial Sequence
  source: /note="Description of Artificial Sequence: Synthetic peptide"
KASQDIDDAMN

SEQ ID NO: 820 - protein, 11 aa, Artificial Sequence
  source: /note="Description of Artificial Sequence: Synthetic peptide"
RASQDIYNNLA

SEQ ID NO: 821 - protein, 16 aa, Artificial Sequence
  source: /note="Description of Artificial Sequence: Synthetic peptide"
RSSQSLLHSNGYNYLD

SEQ ID NO: 822 - protein, 11 aa, Artificial Sequence
  source: /note="Description of Artificial Sequence: Synthetic peptide"
GGNNIGTKSVH

SEQ ID NO: 823 - protein, 11 aa, Artificial Sequence
  source: /note="Description of Artificial Sequence: Synthetic peptide"
SGDGLSKKYVS

SEQ ID NO: 824 - protein, 11 aa, Artificial Sequence
  source: /note="Description of Artificial Sequence: Synthetic peptide"
RASQGIRNWLA

SEQ ID NO: 825 - protein, 11 aa, Artificial Sequence
  source: /note="Description of Artificial Sequence: Synthetic peptide"
GGNNIGSKSVH

SEQ ID NO: 826 - protein, 11 aa, Artificial Sequence
  source: /note="Description of Artificial Sequence: Synthetic peptide"
QGDSLGNYYAT

SEQ ID NO: 827 - protein, 12 aa, Artificial Sequence
  source: /note="Description of Artificial Sequence: Synthetic peptide"
RASQSVSSAYLA

SEQ ID NO: 828 - protein, 11 aa, Artificial Sequence
  source: /note="Description of Artificial Sequence: Synthetic peptide"
RASQSVSNSLA

SEQ ID NO: 829 - protein, 12 aa, Artificial Sequence
  source: /note="Description of Artificial Sequence: Synthetic peptide"
RASQSVSSSFLA

SEQ ID NO: 830 - protein, 12 aa, Artificial Sequence
  source: /note="Description of Artificial Sequence: Synthetic peptide"
RASQSVSTTFLA

SEQ ID NO: 831 - protein, 11 aa, Artificial Sequence
  source: /note="Description of Artificial Sequence: Synthetic peptide"
RASQSISSYLN

SEQ ID NO: 832 - protein, 12 aa, Artificial Sequence
  source: /note="Description of Artificial Sequence: Synthetic peptide"
RATQSIGSSFLA

SEQ ID NO: 833 - protein, 12 aa, Artificial Sequence
  source: /note="Description of Artificial Sequence: Synthetic peptide"
RASQSVSSSYLA

SEQ ID NO: 834 - protein, 12 aa, Artificial Sequence
  source: /note="Description of Artificial Sequence: Synthetic peptide"
RASQSVSSSYLA

SEQ ID NO: 835 - protein, 12 aa, Artificial Sequence
  source: /note="Description of Artificial Sequence: Synthetic peptide"
RASQRVASNYLA

SEQ ID NO: 836 - protein, 12 aa, Artificial Sequence
  source: /note="Description of Artificial Sequence: Synthetic peptide"
RASQSLSSNFLA

SEQ ID NO: 837 - protein, 16 aa, Artificial Sequence
  source: /note="Description of Artificial Sequence: Synthetic peptide"
RSSQSLLHSNGYNYLD

SEQ ID NO: 838 - protein, 12 aa, Artificial Sequence
  source: /note="Description of Artificial Sequence: Synthetic peptide"
RASQSVSSSYLA

SEQ ID NO: 839 - protein, 12 aa, Artificial Sequence
  source: /note="Description of Artificial Sequence: Synthetic peptide"
RASQSVASSFLA

SEQ ID NO: 840 - protein, 11 aa, Artificial Sequence
  source: /note="Description of Artificial Sequence: Synthetic peptide"
RASQDVNTAVS

SEQ ID NO: 841 - protein, 15 aa, Artificial Sequence
  source: /note="Description of Artificial Sequence: Synthetic peptide"
RASESVSVIGAHLIH

SEQ ID NO: 842 - protein, 15 aa, Artificial Sequence
  source: /note="Description of Artificial Sequence: Synthetic peptide"
RASESVTILGSHLIY

SEQ ID NO: 843 - protein, 15 aa, Artificial Sequence
  source: /note="Description of Artificial Sequence: Synthetic peptide"
RASESVTILGSHLIY

SEQ ID NO: 844 - protein, 7 aa, Artificial Sequence
  source: /note="Description of Artificial Sequence: Synthetic peptide"
GASRRAT

SEQ ID NO: 845 - protein, 7 aa, Artificial Sequence
  source: /note="Description of Artificial Sequence: Synthetic peptide"
LGSNRAS

SEQ ID NO: 846 - protein, 7 aa, Artificial Sequence
  source: /note="Description of Artificial Sequence: Synthetic peptide"
EVSNRFS

SEQ ID NO: 847 - protein, 7 aa, Artificial Sequence
  source: /note="Description of Artificial Sequence: Synthetic peptide"
LGSKRAS

SEQ ID NO: 848 - protein, 7 aa, Artificial Sequence
  source: /note="Description of Artificial Sequence: Synthetic peptide"
GASTLAS

SEQ ID NO: 849 - protein, 7 aa, Artificial Sequence
  source: /note="Description of Artificial Sequence: Synthetic peptide"
LGSNRAS

SEQ ID NO: 850 - protein, 7 aa, Artificial Sequence
  source: /note="Description of Artificial Sequence: Synthetic peptide"
GASTRAS

SEQ ID NO: 851 - protein, 7 aa, Artificial Sequence
  source: /note="Description of Artificial Sequence: Synthetic peptide"
GASIRAT

SEQ ID NO: 852 - protein, 7 aa, Artificial Sequence
  source: /note="Description of Artificial Sequence: Synthetic peptide"
DASNRAT

SEQ ID NO: 853 - protein, 7 aa, Artificial Sequence
  source: /note="Description of Artificial Sequence: Synthetic peptide"
AASSLQS

SEQ ID NO: 854 - protein, 7 aa, Artificial Sequence
  source: /note="Description of Artificial Sequence: Synthetic peptide"
AASSLQS

SEQ ID NO: 855 - protein, 7 aa, Artificial Sequence
  source: /note="Description of Artificial Sequence: Synthetic peptide"
EVSNRDS

SEQ ID NO: 856 - protein, 7 aa, Artificial Sequence
  source: /note="Description of Artificial Sequence: Synthetic peptide"
DASTLQT

SEQ ID NO: 857 - protein, 7 aa, Artificial Sequence
  source: /note="Description of Artificial Sequence: Synthetic peptide"
GASTRAT

SEQ ID NO: 858 - protein, 7 aa, Artificial Sequence
  source: /note="Description of Artificial Sequence: Synthetic peptide"
GASSRAS

SEQ ID NO: 859 - protein, 7 aa, Artificial Sequence
  source: /note="Description of Artificial Sequence: Synthetic peptide"
SATSPVP

SEQ ID NO: 860 - protein, 7 aa, Artificial Sequence
  source: /note="Description of Artificial Sequence: Synthetic peptide"
AANKSQS

SEQ ID NO: 861 - protein, 7 aa, Artificial Sequence
  source: /note="Description of Artificial Sequence: Synthetic peptide"
LGSNRAS

SEQ ID NO: 862 - protein, 7 aa, Artificial Sequence
  source: /note="Description of Artificial Sequence: Synthetic peptide"
DDSVRPS

SEQ ID NO: 863 - protein, 7 aa, Artificial Sequence
  source: /note="Description of Artificial Sequence: Synthetic peptide"
RDKERPS

SEQ ID NO: 864 - protein, 7 aa, Artificial Sequence
  source: /note="Description of Artificial Sequence: Synthetic peptide"
AASNLQS

SEQ ID NO: 865 - protein, 7 aa, Artificial Sequence
  source: /note="Description of Artificial Sequence: Synthetic peptide"
GKNNRPS

SEQ ID NO: 866 - protein, 7 aa, Artificial Sequence
  source: /note="Description of Artificial Sequence: Synthetic peptide"
GTNNRPS

SEQ ID NO: 867 - protein, 7 aa, Artificial Sequence
  source: /note="Description of Artificial Sequence: Synthetic peptide"
GASTRAT

SEQ ID NO: 868 - protein, 7 aa, Artificial Sequence
  source: /note="Description of Artificial Sequence: Synthetic peptide"
DASSRAT

SEQ ID NO: 869 - protein, 7 aa, Artificial Sequence
  source: /note="Description of Artificial Sequence: Synthetic peptide"
GASSRAT

SEQ ID NO: 870 - protein, 7 aa, Artificial Sequence
  source: /note="Description of Artificial Sequence: Synthetic peptide"
GSSNRAT

SEQ ID NO: 871 - protein, 7 aa, Artificial Sequence
  source: /note="Description of Artificial Sequence: Synthetic peptide"
AASSLQS

SEQ ID NO: 872 - protein, 7 aa, Artificial Sequence
  source: /note="Description of Artificial Sequence: Synthetic peptide"
GASQRAT

SEQ ID NO: 873 - protein, 7 aa, Artificial Sequence
  source: /note="Description of Artificial Sequence: Synthetic peptide"
GASSRAT

SEQ ID NO: 874 - protein, 7 aa, Artificial Sequence
  source: /note="Description of Artificial Sequence: Synthetic peptide"
GASSRAT

SEQ ID NO: 875 - protein, 7 aa, Artificial Sequence
  source: /note="Description of Artificial Sequence: Synthetic peptide"
GASSRAT

SEQ ID NO: 876 - protein, 7 aa, Artificial Sequence
  source: /note="Description of Artificial Sequence: Synthetic peptide"
GASNWAT

SEQ ID NO: 877 - protein, 7 aa, Artificial Sequence
  source: /note="Description of Artificial Sequence: Synthetic peptide"
LGSNRAS

SEQ ID NO: 878 - protein, 7 aa, Artificial Sequence
  source: /note="Description of Artificial Sequence: Synthetic peptide"
GTSSRAT

SEQ ID NO: 879 - protein, 7 aa, Artificial Sequence
  source: /note="Description of Artificial Sequence: Synthetic peptide"
GASGRAT

SEQ ID NO: 880 - protein, 7 aa, Artificial Sequence
  source: /note="Description of Artificial Sequence: Synthetic peptide"
SASYRYT

SEQ ID NO: 881 - protein, 7 aa, Artificial Sequence
  source: /note="Description of Artificial Sequence: Synthetic peptide"
LASNLET

SEQ ID NO: 882 - protein, 7 aa, Artificial Sequence
  source: /note="Description of Artificial Sequence: Synthetic peptide"
LASNVQT

SEQ ID NO: 883 - protein, 7 aa, Artificial Sequence
  source: /note="Description of Artificial Sequence: Synthetic peptide"
LASNVQT

SEQ ID NO: 884 - protein, 10 aa, Artificial Sequence
  source: /note="Description of Artificial Sequence: Synthetic peptide"
QQYHSSPSWT

SEQ ID NO: 885 - protein, 9 aa, Artificial Sequence
  source: /note="Description of Artificial Sequence: Synthetic peptide"
MQALQTPYT

SEQ ID NO: 886 - protein, 8 aa, Artificial Sequence
  source: /note="Description of Artificial Sequence: Synthetic peptide"
MQNIQFPS

SEQ ID NO: 887 - protein, 9 aa, Artificial Sequence
  source: /note="Description of Artificial Sequence: Synthetic peptide"
MQALQTPYT

SEQ ID NO: 888 - protein, 8 aa, Artificial Sequence
  source: /note="Description of Artificial Sequence: Synthetic peptide"
QQSYKRAS

SEQ ID NO: 889 - protein, 9 aa, Artificial Sequence
  source: /note="Description of Artificial Sequence: Synthetic peptide"
MQGRQFPYS

SEQ ID NO: 890 - protein, 8 aa, Artificial Sequence
  source: /note="Description of Artificial Sequence: Synthetic peptide"
QQYGSSLT

SEQ ID NO: 891 - protein, 9 aa, Artificial Sequence
  source: /note="Description of Artificial Sequence: Synthetic peptide"
QQYGSSSWT

SEQ ID NO: 892 - protein, 10 aa, Artificial Sequence
  source: /note="Description of Artificial Sequence: Synthetic peptide"
QQYGSSPPWT

SEQ ID NO: 893 - protein, 7 aa, Artificial Sequence
  source: /note="Description of Artificial Sequence: Synthetic peptide"
QQSYTLA

SEQ ID NO: 894 - protein, 9 aa, Artificial Sequence
  source: /note="Description of Artificial Sequence: Synthetic peptide"
QQSYSTPYT

SEQ ID NO: 895 - protein, 9 aa, Artificial Sequence
  source: /note="Description of Artificial Sequence: Synthetic peptide"
MQGTHWPGT

SEQ ID NO: 896 - protein, 9 aa, Artificial Sequence
  source: /note="Description of Artificial Sequence: Synthetic peptide"
QQYESLPLT

SEQ ID NO: 897 - protein, 10 aa, Artificial Sequence
  source: /note="Description of Artificial Sequence: Synthetic peptide"
QQYNDWLPVT

SEQ ID NO: 898 - protein, 10 aa, Artificial Sequence
  source: /note="Description of Artificial Sequence: Synthetic peptide"
QQYAGSPPFT

SEQ ID NO: 899 - protein, 9 aa, Artificial Sequence
  source: /note="Description of Artificial Sequence: Synthetic peptide"
LQHDNFPLT

SEQ ID NO: 900 - protein, 9 aa, Artificial Sequence
  source: /note="Description of Artificial Sequence: Synthetic peptide"
QHYYRFPYS

SEQ ID NO: 901 - protein, 9 aa, Artificial Sequence
  source: /note="Description of Artificial Sequence: Synthetic peptide"
MQALQTPYT

SEQ ID NO: 902 - protein, 11 aa, Artificial Sequence
  source: /note="Description of Artificial Sequence: Synthetic peptide"
QVWDSDSEHVV

SEQ ID NO: 903 - protein, 9 aa, Artificial Sequence
  source: /note="Description of Artificial Sequence: Synthetic peptide"
QAWDDTTVV

SEQ ID NO: 904 - protein, 9 aa, Artificial Sequence
  source: /note="Description of Artificial Sequence: Synthetic peptide"
QKYNSAPFT

SEQ ID NO: 905 - protein, 12 aa, Artificial Sequence
  source: /note="Description of Artificial Sequence: Synthetic peptide"
SSRDSSGDHLRV

SEQ ID NO: 906 - protein, 11 aa, Artificial Sequence
  source: /note="Description of Artificial Sequence: Synthetic peptide"
NSRDSSGHHLL

SEQ ID NO: 907 - protein, 14 aa, Artificial Sequence
  source: /note="Description of Artificial Sequence: Synthetic peptide"
QHYGSSFNGSSLFT

SEQ ID NO: 908 - protein, 10 aa, Artificial Sequence
  source: /note="Description of Artificial Sequence: Synthetic peptide"
QQFGTSSGLT

SEQ ID NO: 909 - protein, 10 aa, Artificial Sequence
  source: /note="Description of Artificial Sequence: Synthetic peptide"
QQYHSSPSWT

SEQ ID NO: 910 - protein, 10 aa, Artificial Sequence
  source: /note="Description of Artificial Sequence: Synthetic peptide"
QQYHSSPSWT

SEQ ID NO: 911 - protein, 9 aa, Artificial Sequence
  source: /note="Description of Artificial Sequence: Synthetic peptide"
QQSYSTPYS

SEQ ID NO: 912 - protein, 10 aa, Artificial Sequence
  source: /note="Description of Artificial Sequence: Synthetic peptide"
QHYESSPSWT

SEQ ID NO: 913 - protein, 10 aa, Artificial Sequence
  source: /note="Description of Artificial Sequence: Synthetic peptide"
QQYGSPPRFT

SEQ ID NO: 914 - protein, 10 aa, Artificial Sequence
  source: /note="Description of Artificial Sequence: Synthetic peptide"
QHYGSSPSWT

SEQ ID NO: 915 - protein, 10 aa, Artificial Sequence
  source: /note="Description of Artificial Sequence: Synthetic peptide"
QHYDSSPSWT

SEQ ID NO: 916 - protein, 10 aa, Artificial Sequence
  source: /note="Description of Artificial Sequence: Synthetic peptide"
QYYGTSPMYT

SEQ ID NO: 917 - protein, 9 aa, Artificial Sequence
  source: /note="Description of Artificial Sequence: Synthetic peptide"
MQALQTPLT

SEQ ID NO: 918 - protein, 11 aa, Artificial Sequence
  source: /note="Description of Artificial Sequence: Synthetic peptide"
QHYGNSPPKFT

SEQ ID NO: 919 - protein, 10 aa, Artificial Sequence
  source: /note="Description of Artificial Sequence: Synthetic peptide"
QHYGGSPRLT

SEQ ID NO: 920 - protein, 9 aa, Artificial Sequence
  source: /note="Description of Artificial Sequence: Synthetic peptide"
QQHYSTPWT

SEQ ID NO: 921 - protein, 9 aa, Artificial Sequence
  source: /note="Description of Artificial Sequence: Synthetic peptide"
LQSRIFPRT

SEQ ID NO: 922 - protein, 9 aa, Artificial Sequence
  source: /note="Description of Artificial Sequence: Synthetic peptide"
LQSRTIPRT

SEQ ID NO: 923 - protein, 9 aa, Artificial Sequence
  source: /note="Description of Artificial Sequence: Synthetic peptide"
LQSRTIPRT

SEQ ID NO: 924-948 - skipped (25 entries)

SEQ ID NO: 949 - protein, 490 aa, Artificial Sequence
  source: /note="Description of Artificial Sequence: Synthetic polypeptide"
MALPVTALLLPLALLLHAARPQVQLVESGGGLVQPGRSLRLSCAASGFTFSNYAMSWVRQAPGKGLGWVSGISRSGENTYYADSVKGRFTISRDNSKNTLYLQMNSLRDEDTAVYYCARSPAHYYGGMDVWGQGTTVTVSSASGGGGSGGRASGGGGSDIVLTQSPGTLSLSPGERATLSCRASQSISSSFLAWYQQKPGQAPRLLIYGASRRATGIPDRFSGSGSGTDFTLTISRLEPEDSAVYYCQQYHSSPSWTFGQGTKLEIKTTTPAPRPPTPAPTIASQPLSLRPEACRPAAGGAVHTRGLDFACDIYIWAPLAGTCGVLLLSLVITLYCKRGRKKLLYIFKQPFMRPVQTTQEEDGCSCRFPEEEEGGCELRVKFSRSADAPAYKQGQNQLYNELNLGRREEYDVLDKRRGRDPEMGGKPRRKNPQEGLYNELQKDKMAEAYSEIGMKGERRRGKGHDGLYQGLSTATKDTYDALHMQALPPR

SEQ ID NO: 950 - protein, 488 aa, Artificial Sequence
  source: /note="Description of Artificial Sequence: Synthetic polypeptide"
MALPVTALLLPLALLLHAARPQVQLVESGGGLVQPGRSLRLSCAASGFTFDDYAMHWVRQAPGKGLEWVSGISWNSGSIGYADSVKGRFTISRDNAKNSLYLQMNSLRAEDTALYYCSVHSFLAYWGQGTLVTVSSASGGGGSGGRASGGGGSDIVMTQTPLSLPVTPGEPASISCRSSQSLLHSNGYNYLDWYLQKPGQSPQLLIYLGSNRASGVPDRFSGSGSGTDFTLKISRVEAEDVGVYYCMQALQTPYTFGQGTKVEIKTTTPAPRPPTPAPTIASQPLSLRPEACRPAAGGAVHTRGLDFACDIYIWAPLAGTCGVLLLSLVITLYCKRGRKKLLYIFKQPFMRPVQTTQEEDGCSCRFPEEEEGGCELRVKFSRSADAPAYKQGQNQLYNELNLGRREEYDVLDKRRGRDPEMGGKPRRKNPQEGLYNELQKDKMAEAYSEIGMKGERRRGKGHDGLYQGLSTATKDTYDALHMQALPPR

SEQ ID NO: 951 - protein, 487 aa, Artificial Sequence
  source: /note="Description of Artificial Sequence: Synthetic polypeptide"
MALPVTALLLPLALLLHAARPEVQLLESGGGLVQPGGSLRLSCAVSGFALSNHGMSWVRRAPGKGLEWVSGIVYSGSTYYAASVKGRFTISRDNSRNTLYLQMNSLRPEDTAIYYCSAHGGESDVWGQGTTVTVSSASGGGGSGGRASGGGGSDIVMTQTPLSLSVTPGQPASISCKSSQSLLRNDGKTPLYWYLQKAGQPPQLLIYEVSNRFSGVPDRFSGSGSGTDFTLKISRVEAEDVGAYYCMQNIQFPSFGGGTKLEIKTTTPAPRPPTPAPTIASQPLSLRPEACRPAAGGAVHTRGLDFACDIYIWAPLAGTCGVLLLSLVITLYCKRGRKKLLYIFKQPFMRPVQTTQEEDGCSCRFPEEEEGGCELRVKFSRSADAPAYKQGQNQLYNELNLGRREEYDVLDKRRGRDPEMGGKPRRKNPQEGLYNELQKDKMAEAYSEIGMKGERRRGKGHDGLYQGLSTATKDTYDALHMQALPPR

SEQ ID NO: 952 - protein, 493 aa, Artificial Sequence
  source: /note="Description of Artificial Sequence: Synthetic polypeptide"
MALPVTALLLPLALLLHAARPQVQLVQSGAEVRKTGASVKVSCKASGYIFDNFGINWVRQAPGQGLEWMGWINPKNNNTNYAQKFQGRVTITADESTNTAYMEVSSLRSEDTAVYYCARGPYYYQSYMDVWGQGTMVTVSSASGGGGSGGRASGGGGSDIVMTQTPLSLPVTPGEPASISCRSSQSLLHSNGYNYLNWYLQKPGQSPQLLIYLGSKRASGVPDRFSGSGSGTDFTLHITRVGAEDVGVYYCMQALQTPYTFGQGTKLEIKTTTPAPRPPTPAPTIASQPLSLRPEACRPAAGGAVHTRGLDFACDIYIWAPLAGTCGVLLLSLVITLYCKRGRKKLLYIFKQPFMRPVQTTQEEDGCSCRFPEEEEGGCELRVKFSRSADAPAYKQGQNQLYNELNLGRREEYDVLDKRRGRDPEMGGKPRRKNPQEGLYNELQKDKMAEAYSEIGMKGERRRGKGHDGLYQGLSTATKDTYDALHMQALPPR

SEQ ID NO: 953 - protein, 490 aa, Artificial Sequence
  source: /note="Description of Artificial Sequence: Synthetic polypeptide"
MALPVTALLLPLALLLHAARPQVQLQESGGGLVQPGGSLRLSCAASGFTFSSDAMTWVRQAPGKGLEWVSVISGSGGTTYYADSVKGRFTISRDNSKNTLYLQMNSLRAEDTAVYYCAKLDSSGYYYARGPRYWGQGTLVTVSSASGGGGSGGRASGGGGSDIQLTQSPSSLSASVGDRVTITCRASQSISSYLNWYQQKPGKAPKLLIYGASTLASGVPARFSGSGSGTHFTLTINSLQSEDSATYYCQQSYKRASFGQGTKVEIKTTTPAPRPPTPAPTIASQPLSLRPEACRPAAGGAVHTRGLDFACDIYIWAPLAGTCGVLLLSLVITLYCKRGRKKLLYIFKQPFMRPVQTTQEEDGCSCRFPEEEEGGCELRVKFSRSADAPAYKQGQNQLYNELNLGRREEYDVLDKRRGRDPEMGGKPRRKNPQEGLYNELQKDKMAEAYSEIGMKGERRRGKGHDGLYQGLSTATKDTYDALHMQALPPR

SEQ ID NO: 954 - protein, 491 aa, Artificial Sequence
  source: /note="Description of Artificial Sequence: Synthetic polypeptide"
MALPVTALLLPLALLLHAARPQVQLVQSGAEVKKPGASVKVSCKASGYTFSNYGITWVRQAPGQGLEWMGWISAYNGNTNYAQKFQGRVTMTRNTSISTAYMELSSLRSEDTAVYYCARGPYYYYMDVWGKGTMVTVSSASGGGGSGGRASGGGGSEIVMTQSPLSLPVTPGEPASISCRSSQSLLYSNGYNYVDWYLQKPGQSPQLLIYLGSNRASGVPDRFSGSGSGTDFKLQISRVEAEDVGIYYCMQGRQFPYSFGQGTKVEIKTTTPAPRPPTPAPTIASQPLSLRPEACRPAAGGAVHTRGLDFACDIYIWAPLAGTCGVLLLSLVITLYCKRGRKKLLYIFKQPFMRPVQTTQEEDGCSCRFPEEEEGGCELRVKFSRSADAPAYKQGQNQLYNELNLGRREEYDVLDKRRGRDPEMGGKPRRKNPQEGLYNELQKDKMAEAYSEIGMKGERRRGKGHDGLYQGLSTATKDTYDALHMQALPPR

SEQ ID NO: 955 - protein, 482 aa, Artificial Sequence
  source: /note="Description of Artificial Sequence: Synthetic polypeptide"
MALPVTALLLPLALLLHAARPEVQLLETGGGLVQPGGSLRLSCAVSGFALSNHGMSWVRRAPGKGLEWVSGIVYSGSTYYAASVKGRFTISRDNSRNTLYLQMNSLRPEDTAIYYCSAHGGESDVWGQGTTVTVSSASGGGGSGGRASGGGGSEIVLTQSPATLSVSPGESATLSCRASQSVSSNLAWYQQKPGQAPRLLIYGASTRASGIPDRFSGSGSGTDFTLTISSLQAEDVAVYYCQQYGSSLTFGGGTKVEIKTTTPAPRPPTPAPTIASQPLSLRPEACRPAAGGAVHTRGLDFACDIYIWAPLAGTCGVLLLSLVITLYCKRGRKKLLYIFKQPFMRPVQTTQEEDGCSCRFPEEEEGGCELRVKFSRSADAPAYKQGQNQLYNELNLGRREEYDVLDKRRGRDPEMGGKPRRKNPQEGLYNELQKDKMAEAYSEIGMKGERRRGKGHDGLYQGLSTATKDTYDALHMQALPPR

SEQ ID NO: 956 - protein, 483 aa, Artificial Sequence
  source: /note="Description of Artificial Sequence: Synthetic polypeptide"
MALPVTALLLPLALLLHAARPEVQLVETGGGLVQPGGSLRLSCAVSGFALSNHGMSWVRRAPGKGLEWVSGIVYSGSTYYAASVKGRFTISRDNSRNTLYLQMNSLRPEDTAIYYCSAHGGESDVWGQGTTVTVSSASGGGGSGGRASGGGGSEIVMTQSPATLSVSPGERATLSCRASQSVSSKLAWYQQKPGQAPRLLMYGASIRATGIPDRFSGSGSGTEFTLTISSLEPEDFAVYYCQQYGSSSWTFGQGTKVEIKTTTPAPRPPTPAPTIASQPLSLRPEACRPAAGGAVHTRGLDFACDIYIWAPLAGTCGVLLLSLVITLYCKRGRKKLLYIFKQPFMRPVQTTQEEDGCSCRFPEEEEGGCELRVKFSRSADAPAYKQGQNQLYNELNLGRREEYDVLDKRRGRDPEMGGKPRRKNPQEGLYNELQKDKMAEAYSEIGMKGERRRGKGHDGLYQGLSTATKDTYDALHMQALPPR

SEQ ID NO: 957 - protein, 485 aa, Artificial Sequence
  source: /note="Description of Artificial Sequence: Synthetic polypeptide"
MALPVTALLLPLALLLHAARPEVQLVETGGGVVQPGGSLRLSCAVSGFALSNHGMSWVRRAPGKGLEWVSGIVYSGSTYYAASVKGRFTISRDNSRNTLYLQMNSLRPEDTAIYYCSAHGGESDVWGQGTTVTVSSASGGGGSGGRASGGGGSEIVLTQSPGTLSLSPGERATLSCRASQSVGSTNLAWYQQKPGQAPRLLIYDASNRATGIPDRFSGGGSGTDFTLTISRLEPEDFAVYYCQQYGSSPPWTFGQGTKVEIKTTTPAPRPPTPAPTIASQPLSLRPEACRPAAGGAVHTRGLDFACDIYIWAPLAGTCGVLLLSLVITLYCKRGRKKLLYIFKQPFMRPVQTTQEEDGCSCRFPEEEEGGCELRVKFSRSADAPAYKQGQNQLYNELNLGRREEYDVLDKRRGRDPEMGGKPRRKNPQEGLYNELQKDKMAEAYSEIGMKGERRRGKGHDGLYQGLSTATKDTYDALHMQALPPR

SEQ ID NO: 958 - protein, 483 aa, Artificial Sequence
  source: /note="Description of Artificial Sequence: Synthetic polypeptide"
MALPVTALLLPLALLLHAARPQVQLVESGGGLVKPGGSLRLSCAASGFTFSDYYMSWIRQAPGKGLEWVSYISSSGSTIYYADSVKGRFTISRDNAKNSLYLQMNSLRAEDTAVYYCARESGDGMDVWGQGTTVTVSSASGGGGSGGRASGGGGSDIQMTQSPSSLSASVGDRVTITCRASQSISSYLNWYQQKPGKAPKLLIYAASSLQSGVPSRFSGSGSGTDFTLTISSLQPEDFATYYCQQSYTLAFGQGTKVDIKTTTPAPRPPTPAPTIASQPLSLRPEACRPAAGGAVHTRGLDFACDIYIWAPLAGTCGVLLLSLVITLYCKRGRKKLLYIFKQPFMRPVQTTQEEDGCSCRFPEEEEGGCELRVKFSRSADAPAYKQGQNQLYNELNLGRREEYDVLDKRRGRDPEMGGKPRRKNPQEGLYNELQKDKMAEAYSEIGMKGERRRGKGHDGLYQGLSTATKDTYDALHMQALPPR

SEQ ID NO: 959 - protein, 483 aa, Artificial Sequence
  source: /note="Description of Artificial Sequence: Synthetic polypeptide"
MALPVTALLLPLALLLHAARPEVQLVESGGGLVQPGGSLRLSCAVSGFALSNHGMSWVRRAPGKGLEWVSGIVYSGSTYYAASVKGRFTISRDNSRNTLYLQMNSLRPEDTAIYYCSAHGGESDVWGQGTTVTVSSASGGGGSGGRASGGGGSDIQLTQSPSSLSASVGDRVTITCRASQSISSYLNWYQQKPGKAPKLLIYAASSLQSGVPSRFSGSGSGTDFTLTISSLQPEDFATYYCQQSYSTPYTFGQGTKVEIKTTTPAPRPPTPAPTIASQPLSLRPEACRPAAGGAVHTRGLDFACDIYIWAPLAGTCGVLLLSLVITLYCKRGRKKLLYIFKQPFMRPVQTTQEEDGCSCRFPEEEEGGCELRVKFSRSADAPAYKQGQNQLYNELNLGRREEYDVLDKRRGRDPEMGGKPRRKNPQEGLYNELQKDKMAEAYSEIGMKGERRRGKGHDGLYQGLSTATKDTYDALHMQALPPR

SEQ ID NO: 960 - protein, 490 aa, Artificial Sequence
  source: /note="Description of Artificial Sequence: Synthetic polypeptide"
MALPVTALLLPLALLLHAARPQVQLVQSGGGLVKPGGSLRLSCAASGFTFSDYYMSWIRQAPGKGLEWVSYISSSGNTIYYADSVKGRFTISRDNAKNSLYLQMNSLRAEDTAVYYCARSTMVREDYWGQGTLVTVSSASGGGGSGGRASGGGGSDIVLTQSPLSLPVTLGQPASISCKSSESLVHNSGKTYLNWFHQRPGQSPRRLIYEVSNRDSGVPDRFTGSGSGTDFTLKISRVEAEDVGVYYCMQGTHWPGTFGQGTKLEIKTTTPAPRPPTPAPTIASQPLSLRPEACRPAAGGAVHTRGLDFACDIYIWAPLAGTCGVLLLSLVITLYCKRGRKKLLYIFKQPFMRPVQTTQEEDGCSCRFPEEEEGGCELRVKFSRSADAPAYKQGQNQLYNELNLGRREEYDVLDKRRGRDPEMGGKPRRKNPQEGLYNELQKDKMAEAYSEIGMKGERRRGKGHDGLYQGLSTATKDTYDALHMQALPPR

SEQ ID NO: 961 - protein, 483 aa, Artificial Sequence
  source: /note="Description of Artificial Sequence: Synthetic polypeptide"
MALPVTALLLPLALLLHAARPQVQLVESGGGLVQPGGSLRLSCAVSGFALSNHGMSWVRRAPGKGLEWVSGIVYSGSTYYAASVKGRFTISRDNSRNTLYLQMNSLRPEDTAIYYCSAHGGESDVWGQGTTVTVSSASGGGGSGGRASGGGGSDIRLTQSPSPLSASVGDRVTITCQASEDINKFLNWYHQTPGKAPKLLIYDASTLQTGVPSRFSGSGSGTDFTLTINSLQPEDIGTYYCQQYESLPLTFGGGTKVEIKTTTPAPRPPTPAPTIASQPLSLRPEACRPAAGGAVHTRGLDFACDIYIWAPLAGTCGVLLLSLVITLYCKRGRKKLLYIFKQPFMRPVQTTQEEDGCSCRFPEEEEGGCELRVKFSRSADAPAYKQGQNQLYNELNLGRREEYDVLDKRRGRDPEMGGKPRRKNPQEGLYNELQKDKMAEAYSEIGMKGERRRGKGHDGLYQGLSTATKDTYDALHMQALPPR

SEQ ID NO: 962 - protein, 484 aa, Artificial Sequence
  source: /note="Description of Artificial Sequence: Synthetic polypeptide"
MALPVTALLLPLALLLHAARPEVQLVETGGGLVQPGGSLRLSCAVSGFALSNHGMSWVRRAPGKGLEWVSGIVYSGSTYYAASVKGRFTISRDNSRNTLYLQMNSLRPEDTAIYYCSAHGGESDVWGQGTTVTVSSASGGGGSGGRASGGGGSETTLTQSPATLSVSPGERATLSCRASQSVGSNLAWYQQKPGQGPRLLIYGASTRATGIPARFSGSGSGTEFTLTISSLQPEDFAVYYCQQYNDWLPVTFGQGTKVEIKTTTPAPRPPTPAPTIASQPLSLRPEACRPAAGGAVHTRGLDFACDIYIWAPLAGTCGVLLLSLVITLYCKRGRKKLLYIFKQPFMRPVQTTQEEDGCSCRFPEEEEGGCELRVKFSRSADAPAYKQGQNQLYNELNLGRREEYDVLDKRRGRDPEMGGKPRRKNPQEGLYNELQKDKMAEAYSEIGMKGERRRGKGHDGLYQGLSTATKDTYDALHMQALPPR

SEQ ID NO: 963 - protein, 485 aa, Artificial Sequence
  source: /note="Description of Artificial Sequence: Synthetic polypeptide"
MALPVTALLLPLALLLHAARPEVQLVESGGGLVQPGGSLRLSCAVSGFALSNHGMSWVRRAPGKGLEWVSGIVYSGSTYYAASVKGRFTISRDNSRNTLYLQMNSLRPEDTAIYYCSAHGGESDVWGQGTTVTVSSASGGGGSGGRASGGGGSEIVLTQSPGTLSLSPGERATLSCRASQSIGSSSLAWYQQKPGQAPRLLMYGASSRASGIPDRFSGSGSGTDFTLTISRLEPEDFAVYYCQQYAGSPPFTFGQGTKVEIKTTTPAPRPPTPAPTIASQPLSLRPEACRPAAGGAVHTRGLDFACDIYIWAPLAGTCGVLLLSLVITLYCKRGRKKLLYIFKQPFMRPVQTTQEEDGCSCRFPEEEEGGCELRVKFSRSADAPAYKQGQNQLYNELNLGRREEYDVLDKRRGRDPEMGGKPRRKNPQEGLYNELQKDKMAEAYSEIGMKGERRRGKGHDGLYQGLSTATKDTYDALHMQALPPR

SEQ ID NO: 964 - DNA, 1470 bp, Artificial Sequence
  source: /note="Description of Artificial Sequence: Synthetic polynucleotide"
atggccctccctgtcaccgccctgctgcttccgctggctcttctgctccacgccgctcggccccaagtgcaactcgtggaatctggtggaggactcgtgcaacccggaagatcgcttagactgtcgtgtgccgccagcgggttcactttctcgaactacgcgatgtcctgggtccgccaggcacccggaaagggactcggttgggtgtccggcatttcccggtccggcgaaaatacctactacgccgactccgtgaagggccgcttcaccatctcaagggacaacagcaaaaacaccctgtacttgcaaatgaactccctgcgggatgaagatacagccgtgtactattgcgcccggtcgcctgcccattactacggcggaatggacgtctggggacagggaaccactgtgactgtcagcagcgcgtcgggtggcggcggctcagggggtcgggcctccggggggggagggtccgacatcgtgctgacccagtccccgggaaccctgagcctgagcccgggagagcgcgcgaccctgtcatgccgggcatcccagagcattagctcctcctttctcgcctggtatcagcagaagcccggacaggccccgaggctgctgatctacggcgctagcagaagggctaccggaatcccagaccggttctccggctccggttccgggaccgatttcacccttactatctcgcgcctggaacctgaggactccgccgtctactactgccagcagtaccactcatccccgtcgtggacgttcggacagggcaccaagctggagattaagaccactaccccagcaccgaggccacccaccccggctcctaccatcgcctcccagcctctgtccctgcgtccggaggcatgtagacccgcagctggtggggccgtgcatacccggggtcttgacttcgcctgcgatatctacatttgggcccctctggctggtacttgcggggtcctgctgctttcactcgtgatcactctttactgtaagcgcggtcggaagaagctgctgtacatctttaagcaacccttcatgaggcctgtgcagactactcaagaggaggacggctgttcatgccggttcccagaggaggaggaaggcggctgcgaactgcgcgtgaaattcagccgcagcgcagatgctccagcctacaagcaggggcagaaccagctctacaacgaactcaatcttggtcggagagaggagtacgacgtgctggacaagcggagaggacgggacccagaaatgggcgggaagccgcgcagaaagaatccccaagagggcctgtacaacgagctccaaaaggataagatggcagaagcctatagcgagattggtatgaaaggggaacgcagaagaggcaaaggccacgacggactgtaccagggactcagcaccgccaccaaggacacctatgacgctcttcacatgcaggccctgccgcctcgg

SEQ ID NO: 965 - DNA, 1464 bp, Artificial Sequence
  source: /note="Description of Artificial Sequence: Synthetic polynucleotide"
atggccctccctgtcaccgccctgctgcttccgctggctcttctgctccacgccgctcggccccaagtgcaactcgtcgaatccggtggaggtctggtccaacctggtagaagcctgagactgtcgtgtgcggccagcggattcacctttgatgactatgctatgcactgggtgcggcaggccccaggaaagggcctggaatgggtgtcgggaattagctggaactccgggtccattggctacgccgactccgtgaagggccgcttcaccatctcccgcgacaacgcaaagaactccctgtacttgcaaatgaactcgctcagggctgaggataccgcgctgtactactgctccgtgcattccttcctggcctactggggacagggaactctggtcaccgtgtcgagcgcctccggcggcgggggctcgggtggacgggcctcgggcggaggggggtccgacatcgtgatgacccagaccccgctgagcttgcccgtgactcccggagagcctgcatccatctcctgccggtcatcccagtcccttctccactccaacggatacaactacctcgactggtacctccagaagccgggacagagccctcagcttctgatctacctggggtcaaatagagcctcaggagtgccggatcggttcagcggatctggttcgggaactgatttcactctgaagatttcccgcgtggaagccgaggacgtgggcgtctactactgtatgcaggcgctgcagaccccctataccttcggccaagggacgaaagtggagatcaagaccactaccccagcaccgaggccacccaccccggctcctaccatcgcctcccagcctctgtccctgcgtccggaggcatgtagacccgcagctggtggggccgtgcatacccggggtcttgacttcgcctgcgatatctacatttgggcccctctggctggtacttgcggggtcctgctgctttcactcgtgatcactctttactgtaagcgcggtcggaagaagctgctgtacatctttaagcaacccttcatgaggcctgtgcagactactcaagaggaggacggctgttcatgccggttcccagaggaggaggaaggcggctgcgaactgcgcgtgaaattcagccgcagcgcagatgctccagcctacaagcaggggcagaaccagctctacaacgaactcaatcttggtcggagagaggagtacgacgtgctggacaagcggagaggacgggacccagaaatgggcgggaagccgcgcagaaagaatccccaagagggcctgtacaacgagctccaaaaggataagatggcagaagcctatagcgagattggtatgaaaggggaacgcagaagaggcaaaggccacgacggactgtaccagggactcagcaccgccaccaaggacacctatgacgctcttcacatgcaggccctgccgcctcgg

SEQ ID NO: 966 - DNA, 1461 bp, Artificial Sequence
  source: /note="Description of Artificial Sequence: Synthetic polynucleotide"
atggccctccctgtcaccgccctgctgcttccgctggctcttctgctccacgccgctcggcccgaagtgcaattgttggaatctggaggaggacttgtgcagcctggaggatcactgagactttcgtgtgcggtgtcaggcttcgccctgagcaaccacggcatgagctgggtgcggagagccccggggaagggtctggaatgggtgtccgggatcgtctactccggttcaacttactacgccgcaagcgtgaagggtcgcttcaccatttcccgcgataactcccggaacaccctgtacctccaaatgaactccctgcggcccgaggacaccgccatctactactgttccgcgcatggaggagagtccgatgtctggggacagggcactaccgtgaccgtgtcgagcgcctcggggggaggaggctccggcggtcgcgcctccggggggggtggcagcgacattgtgatgacgcagactccactctcgctgtccgtgaccccgggacagcccgcgtccatctcgtgcaagagctcccagagcctgctgaggaacgacggaaagactcctctgtattggtacctccagaaggctggacagcccccgcaactgctcatctacgaagtgtcaaatcgcttctccggggtgccggatcggttttccggctcgggatcgggcaccgacttcaccctgaaaatctccagggtcgaggccgaggacgtgggagcctactactgcatgcaaaacatccagttcccttccttcggcggcggcacaaagctggagattaagaccactaccccagcaccgaggccacccaccccggctcctaccatcgcctcccagcctctgtccctgcgtccggaggcatgtagacccgcagctggtggggccgtgcatacccggggtcttgacttcgcctgcgatatctacatttgggcccctctggctggtacttgcggggtcctgctgctttcactcgtgatcactctttactgtaagcgcggtcggaagaagctgctgtacatctttaagcaacccttcatgaggcctgtgcagactactcaagaggaggacggctgttcatgccggttcccagaggaggaggaaggcggctgcgaactgcgcgtgaaattcagccgcagcgcagatgctccagcctacaagcaggggcagaaccagctctacaacgaactcaatcttggtcggagagaggagtacgacgtgctggacaagcggagaggacgggacccagaaatgggcgggaagccgcgcagaaagaatccccaagagggcctgtacaacgagctccaaaaggataagatggcagaagcctatagcgagattggtatgaaaggggaacgcagaagaggcaaaggccacgacggactgtaccagggactcagcaccgccaccaaggacacctatgacgctcttcacatgcaggccctgccgcctcgg

SEQ ID NO: 967 - DNA, 1479 bp, Artificial Sequence
  source: /note="Description of Artificial Sequence: Synthetic polynucleotide"
atggccctccctgtcaccgccctgctgcttccgctggctcttctgctccacgccgctcggccccaagtccaactcgtccagtccggcgcagaagtcagaaaaaccggtgctagcgtgaaagtgtcctgcaaggcctccggctacattttcgataacttcggaatcaactgggtcagacaggccccgggccaggggctggaatggatgggatggatcaaccccaagaacaacaacaccaactacgcacagaagttccagggccgcgtgactatcaccgccgatgaatcgaccaataccgcctacatggaggtgtcctccctgcggtcggaggacactgccgtgtattactgcgcgaggggcccatactactaccaaagctacatggacgtctggggacagggaaccatggtgaccgtgtcatccgcctccggtggtggaggctccggggggcgggcttcaggaggcggaggaagcgatattgtgatgacccagactccgcttagcctgcccgtgactcctggagaaccggcctccatttcctgccggtcctcgcaatcactcctgcattccaacggttacaactacctgaattggtacctccagaagcctggccagtcgccccagttgctgatctatctgggctcgaagcgcgcctccggggtgcctgaccggtttagcggatctgggagcggcacggacttcactctccacatcacccgcgtgggagcggaggacgtgggagtgtactactgtatgcaggcgctgcagactccgtacacattcggacagggcaccaagctggagatcaagaccactaccccagcaccgaggccacccaccccggctcctaccatcgcctcccagcctctgtccctgcgtccggaggcatgtagacccgcagctggtggggccgtgcatacccggggtcttgacttcgcctgcgatatctacatttgggcccctctggctggtacttgcggggtcctgctgctttcactcgtgatcactctttactgtaagcgcggtcggaagaagctgctgtacatctttaagcaacccttcatgaggcctgtgcagactactcaagaggaggacggctgttcatgccggttcccagaggaggaggaaggcggctgcgaactgcgcgtgaaattcagccgcagcgcagatgctccagcctacaagcaggggcagaaccagctctacaacgaactcaatcttggtcggagagaggagtacgacgtgctggacaagcggagaggacgggacccagaaatgggcgggaagccgcgcagaaagaatccccaagagggcctgtacaacgagctccaaaaggataagatggcagaagcctatagcgagattggtatgaaaggggaacgcagaagaggcaaaggccacgacggactgtaccagggactcagcaccgccaccaaggacacctatgacgctcttcacatgcaggccctgccgcctcgg

SEQ ID NO: 968 - DNA, 1470 bp, Artificial Sequence
  source: /note="Description of Artificial Sequence: Synthetic polynucleotide"
atggccctccctgtcaccgccctgctgcttccgctggctcttctgctccacgccgctcggccccaagtgcaacttcaagaatcaggcggaggactcgtgcagcccggaggatcattgcggctctcgtgcgccgcctcgggcttcaccttctcgagcgacgccatgacctgggtccgccaggccccggggaaggggctggaatgggtgtctgtgatttccggctccgggggaactacgtactacgccgattccgtgaaaggtcgcttcactatctcccgggacaacagcaagaacaccctttatctgcaaatgaattccctccgcgccgaggacaccgccgtgtactactgcgccaagctggactcctcgggctactactatgcccggggtccgagatactggggacagggaaccctcgtgaccgtgtcctccgcgtccggcggaggagggtcgggagggcgggcctccggcggcggcggttcggacatccagctgacccagtccccatcctcactgagcgcaagcgtgggcgacagagtcaccattacatgcagggcgtcccagagcatcagctcctacctgaactggtaccaacagaagcctggaaaggctcctaagctgttgatctacggggcttcgaccctggcatccggggtgcccgcgaggtttagcggaagcggtagcggcactcacttcactctgaccattaacagcctccagtccgaggattcagccacttactactgtcagcagtcctacaagcgggccagcttcggacagggcactaaggtcgagatcaagaccactaccccagcaccgaggccacccaccccggctcctaccatcgcctcccagcctctgtccctgcgtccggaggcatgtagacccgcagctggtggggccgtgcatacccggggtcttgacttcgcctgcgatatctacatttgggcccctctggctggtacttgcggggtcctgctgctttcactcgtgatcactctttactgtaagcgcggtcggaagaagctgctgtacatctttaagcaacccttcatgaggcctgtgcagactactcaagaggaggacggctgttcatgccggttcccagaggaggaggaaggcggctgcgaactgcgcgtgaaattcagccgcagcgcagatgctccagcctacaagcaggggcagaaccagctctacaacgaactcaatcttggtcggagagaggagtacgacgtgctggacaagcggagaggacgggacccagaaatgggcgggaagccgcgcagaaagaatccccaagagggcctgtacaacgagctccaaaaggataagatggcagaagcctatagcgagattggtatgaaaggggaacgcagaagaggcaaaggccacgacggactgtaccagggactcagcaccgccaccaaggacacctatgacgctcttcacatgcaggccctgccgcctcgg

SEQ ID NO: 969 - DNA, 1473 bp, Artificial Sequence
  source: /note="Description of Artificial Sequence: Synthetic polynucleotide"
atggccctccctgtcaccgccctgctgcttccgctggctcttctgctccacgccgctcggccccaagtccaactggtccagagcggtgcagaagtgaagaagcccggagcgagcgtgaaagtgtcctgcaaggcttccgggtacaccttctccaactacggcatcacttgggtgcgccaggccccgggacagggcctggaatggatggggtggatttccgcgtacaacggcaatacgaactacgctcagaagttccagggtagagtgaccatgactaggaacacctccatttccaccgcctacatggaactgtcctccctgcggagcgaggacaccgccgtgtactattgcgcccggggaccatactactactacatggatgtctgggggaaggggactatggtcaccgtgtcatccgcctcgggaggcggcggatcaggaggacgcgcctctggtggtggaggatcggagatcgtgatgacccagagccctctctccttgcccgtgactcctggggagcccgcatccatttcatgccggagctcccagtcacttctctactccaacggctataactacgtggattggtacctccaaaagccgggccagagcccgcagctgctgatctacctgggctcgaacagggccagcggagtgcctgaccggttctccgggtcgggaagcgggaccgacttcaagctgcaaatctcgagagtggaggccgaggacgtgggaatctactactgtatgcagggccgccagtttccgtactcgttcggacagggcaccaaagtggaaatcaagaccactaccccagcaccgaggccacccaccccggctcctaccatcgcctcccagcctctgtccctgcgtccggaggcatgtagacccgcagctggtggggccgtgcatacccggggtcttgacttcgcctgcgatatctacatttgggcccctctggctggtacttgcggggtcctgctgctttcactcgtgatcactctttactgtaagcgcggtcggaagaagctgctgtacatctttaagcaacccttcatgaggcctgtgcagactactcaagaggaggacggctgttcatgccggttcccagaggaggaggaaggcggctgcgaactgcgcgtgaaattcagccgcagcgcagatgctccagcctacaagcaggggcagaaccagctctacaacgaactcaatcttggtcggagagaggagtacgacgtgctggacaagcggagaggacgggacccagaaatgggcgggaagccgcgcagaaagaatccccaagagggcctgtacaacgagctccaaaaggataagatggcagaagcctatagcgagattggtatgaaaggggaacgcagaagaggcaaaggccacgacggactgtaccagggactcagcaccgccaccaaggacacctatgacgctcttcacatgcaggccctgccgcctcgg

SEQ ID NO: 970 - DNA, 1446 bp, Artificial Sequence
  source: /note="Description of Artificial Sequence: Synthetic polynucleotide"
atggccctccctgtcaccgccctgctgcttccgctggctcttctgctccacgccgctcggcccgaagtgcaattgctcgaaactggaggaggtctggtgcaacctggaggatcacttcgcctgtcctgcgccgtgtcgggctttgccctgtccaaccatggaatgagctgggtccgccgcgcgccggggaagggcctcgaatgggtgtccggcatcgtctactccggctccacctactacgccgcgtccgtgaagggccggttcacgatttcacgggacaactcgcggaacaccctgtacctccaaatgaattcccttcggccggaggatactgccatctactactgctccgcccacggtggcgaatccgacgtctggggccagggaaccaccgtgaccgtgtccagcgcgtccgggggaggaggaagcgggggtagagcatcgggtggaggcggatcagagatcgtgctgacccagtcccccgccaccttgagcgtgtcaccaggagagtccgccaccctgtcatgccgcgccagccagtccgtgtcctccaacctggcttggtaccagcagaagccggggcaggcccctagactcctgatctatggggcgtcgacccgggcatctggaattcccgataggttcagcggatcgggctcgggcactgacttcactctgaccatctcctcgctgcaagccgaggacgtggctgtgtactactgtcagcagtacggaagctccctgactttcggtggcgggaccaaagtcgagattaagaccactaccccagcaccgaggccacccaccccggctcctaccatcgcctcccagcctctgtccctgcgtccggaggcatgtagacccgcagctggtggggccgtgcatacccggggtcttgacttcgcctgcgatatctacatttgggcccctctggctggtacttgcggggtcctgctgctttcactcgtgatcactctttactgtaagcgcggtcggaagaagctgctgtacatctttaagcaacccttcatgaggcctgtgcagactactcaagaggaggacggctgttcatgccggttcccagaggaggaggaaggcggctgcgaactgcgcgtgaaattcagccgcagcgcagatgctccagcctacaagcaggggcagaaccagctctacaacgaactcaatcttggtcggagagaggagtacgacgtgctggacaagcggagaggacgggacccagaaatgggcgggaagccgcgcagaaagaatccccaagagggcctgtacaacgagctccaaaaggataagatggcagaagcctatagcgagattggtatgaaaggggaacgcagaagaggcaaaggccacgacggactgtaccagggactcagcaccgccaccaaggacacctatgacgctcttcacatgcaggccctgccgcctcgg

SEQ ID NO: 971 - DNA, 1449 bp, Artificial Sequence
  source: /note="Description of Artificial Sequence: Synthetic polynucleotide"
atggccctccctgtcaccgccctgctgcttccgctggctcttctgctccacgccgctcggcccgaagtgcaattggtggaaactggaggaggacttgtgcaacctggaggatcattgagactgagctgcgcagtgtcgggattcgccctgagcaaccatggaatgtcctgggtcagaagggcccctggaaaaggcctcgaatgggtgtcagggatcgtgtactccggttccacttactacgccgcctccgtgaaggggcgcttcactatctcacgggataactcccgcaataccctgtacctccaaatgaacagcctgcggccggaggataccgccatctactactgttccgcccacggtggagagtctgacgtctggggccagggaactaccgtgaccgtgtcctccgcgtccggcggtggagggagcggcggccgcgccagcggcggcggaggctccgagatcgtgatgacccagagccccgctactctgtcggtgtcgcccggagaaagggcgaccctgtcctgccgggcgtcgcagtccgtgagcagcaagctggcttggtaccagcagaagccgggccaggcaccacgcctgcttatgtacggtgcctccattcgggccaccggaatcccggaccggttctcggggtcggggtccggtaccgagttcacactgaccatttcctcgctcgagcccgaggactttgccgtctattactgccagcagtacggctcctcctcatggacgttcggccaggggaccaaggtcgaaatcaagaccactaccccagcaccgaggccacccaccccggctcctaccatcgcctcccagcctctgtccctgcgtccggaggcatgtagacccgcagctggtggggccgtgcatacccggggtcttgacttcgcctgcgatatctacatttgggcccctctggctggtacttgcggggtcctgctgctttcactcgtgatcactctttactgtaagcgcggtcggaagaagctgctgtacatctttaagcaacccttcatgaggcctgtgcagactactcaagaggaggacggctgttcatgccggttcccagaggaggaggaaggcggctgcgaactgcgcgtgaaattcagccgcagcgcagatgctccagcctacaagcaggggcagaaccagctctacaacgaactcaatcttggtcggagagaggagtacgacgtgctggacaagcggagaggacgggacccagaaatgggcgggaagccgcgcagaaagaatccccaagagggcctgtacaacgagctccaaaaggataagatggcagaagcctatagcgagattggtatgaaaggggaacgcagaagaggcaaaggccacgacggactgtaccagggactcagcaccgccaccaaggacacctatgacgctcttcacatgcaggccctgccgcctcgg

SEQ ID NO: 972 - DNA, 1455 bp, Artificial Sequence
  source: /note="Description of Artificial Sequence: Synthetic polynucleotide"
atggccctccctgtcaccgccctgctgcttccgctggctcttctgctccacgccgctcggcccgaagtgcaattggtggagactggaggaggagtggtgcaacctggaggaagcctgagactgtcatgcgcggtgtcgggcttcgccctctccaaccacggaatgtcctgggtccgccgggcccctgggaaaggacttgaatgggtgtccggcatcgtgtactcgggttccacctactacgcggcctcagtgaagggccggtttactattagccgcgacaactccagaaacacactgtacctccaaatgaactcgctgcggccggaagataccgctatctactactgctccgcccatgggggagagtcggacgtctggggacagggcaccactgtcactgtgtccagcgcttccggcggtggtggaagcgggggacgggcctcaggaggcggtggcagcgagattgtgctgacccagtcccccgggaccctgagcctgtccccgggagaaagggccaccctctcctgtcgggcatcccagtccgtggggtctactaaccttgcatggtaccagcagaagcccggccaggcccctcgcctgctgatctacgacgcgtccaatagagccaccggcatcccggatcgcttcagcggaggcggatcgggcaccgacttcaccctcaccatttcaaggctggaaccggaggacttcgccgtgtactactgccagcagtatggttcgtccccaccctggacgttcggccaggggactaaggtcgagatcaagaccactaccccagcaccgaggccacccaccccggctcctaccatcgcctcccagcctctgtccctgcgtccggaggcatgtagacccgcagctggtggggccgtgcatacccggggtcttgacttcgcctgcgatatctacatttgggcccctctggctggtacttgcggggtcctgctgctttcactcgtgatcactctttactgtaagcgcggtcggaagaagctgctgtacatctttaagcaacccttcatgaggcctgtgcagactactcaagaggaggacggctgttcatgccggttcccagaggaggaggaaggcggctgcgaactgcgcgtgaaattcagccgcagcgcagatgctccagcctacaagcaggggcagaaccagctctacaacgaactcaatcttggtcggagagaggagtacgacgtgctggacaagcggagaggacgggacccagaaatgggcgggaagccgcgcagaaagaatccccaagagggcctgtacaacgagctccaaaaggataagatggcagaagcctatagcgagattggtatgaaaggggaacgcagaagaggcaaaggccacgacggactgtaccagggactcagcaccgccaccaaggacacctatgacgctcttcacatgcaggccctgccgcctcgg

SEQ ID NO: 973 - DNA, 1449 bp, Artificial Sequence
  source: /note="Description of Artificial Sequence: Synthetic polynucleotide"
atggccctccctgtcaccgccctgctgcttccgctggctcttctgctccacgccgctcggccccaagtgcaactcgtggaatctggtggaggactcgtgaaacctggaggatcattgagactgtcatgcgcggcctcgggattcacgttctccgattactacatgagctggattcgccaggctccggggaagggactggaatgggtgtcctacatttcctcatccggctccaccatctactacgcggactccgtgaaggggagattcaccattagccgcgataacgccaagaacagcctgtaccttcagatgaactccctgcgggctgaagatactgccgtctactactgcgcaagggagagcggagatgggatggacgtctggggacagggtaccactgtgaccgtgtcgtcggcctccggcggagggggttcgggtggaagggccagcggcggcggaggcagcgacatccagatgacccagtccccctcatcgctgtccgcctccgtgggcgaccgcgtcaccatcacatgccgggcctcacagtcgatctcctcctacctcaattggtatcagcagaagcccggaaaggcccctaagcttctgatctacgcagcgtcctccctgcaatccggggtcccatctcggttctccggctcgggcagcggtaccgacttcactctgaccatctcgagcctgcagccggaggacttcgccacttactactgtcagcaaagctacaccctcgcgtttggccagggcaccaaagtggacatcaagaccactaccccagcaccgaggccacccaccccggctcctaccatcgcctcccagcctctgtccctgcgtccggaggcatgtagacccgcagctggtggggccgtgcatacccggggtcttgacttcgcctgcgatatctacatttgggcccctctggctggtacttgcggggtcctgctgctttcactcgtgatcactctttactgtaagcgcggtcggaagaagctgctgtacatctttaagcaacccttcatgaggcctgtgcagactactcaagaggaggacggctgttcatgccggttcccagaggaggaggaaggcggctgcgaactgcgcgtgaaattcagccgcagcgcagatgctccagcctacaagcaggggcagaaccagctctacaacgaactcaatcttggtcggagagaggagtacgacgtgctggacaagcggagaggacgggacccagaaatgggcgggaagccgcgcagaaagaatccccaagagggcctgtacaacgagctccaaaaggataagatggcagaagcctatagcgagattggtatgaaaggggaacgcagaagaggcaaaggccacgacggactgtaccagggactcagcaccgccaccaaggacacctatgacgctcttcacatgcaggccctgccgcctcgg

SEQ ID NO: 974 - DNA, 1449 bp, Artificial Sequence
  source: /note="Description of Artificial Sequence: Synthetic polynucleotide"
atggccctccctgtcaccgccctgctgcttccgctggctcttctgctccacgccgctcggcccgaagtgcaattggtggaatcagggggaggacttgtgcagcctggaggatcgctgagactgtcatgtgccgtgtccggctttgccctgtccaaccacgggatgtcctgggtccgccgcgcgcctggaaagggcctcgaatgggtgtcgggtattgtgtacagcggtagcacctactatgccgcatccgtgaaggggagattcaccatcagccgggacaactccaggaacactctgtacctccaaatgaattcgctgaggccagaggacactgccatctactactgctccgcgcatggcggagagtccgacgtctggggacaggggaccaccgtgaccgtgtctagcgcgtccggcggaggcggcagcgggggtcgggcatcagggggcggcggatcggacatccagctcacccagtccccgagctcgctgtccgcctccgtgggagatcgggtcaccatcacgtgccgcgccagccagtcgatttcctcctacctgaactggtaccaacagaagcccggaaaagccccgaagcttctcatctacgccgcctcgagcctgcagtcaggagtgccctcacggttctccggctccggttccggtactgatttcaccctgaccatttcctccctgcaaccggaggacttcgctacttactactgccagcagtcgtactccaccccctacactttcggacaaggcaccaaggtcgaaatcaagaccactaccccagcaccgaggccacccaccccggctcctaccatcgcctcccagcctctgtccctgcgtccggaggcatgtagacccgcagctggtggggccgtgcatacccggggtcttgacttcgcctgcgatatctacatttgggcccctctggctggtacttgcggggtcctgctgctttcactcgtgatcactctttactgtaagcgcggtcggaagaagctgctgtacatctttaagcaacccttcatgaggcctgtgcagactactcaagaggaggacggctgttcatgccggttcccagaggaggaggaaggcggctgcgaactgcgcgtgaaattcagccgcagcgcagatgctccagcctacaagcaggggcagaaccagctctacaacgaactcaatcttggtcggagagaggagtacgacgtgctggacaagcggagaggacgggacccagaaatgggcgggaagccgcgcagaaagaatccccaagagggcctgtacaacgagctccaaaaggataagatggcagaagcctatagcgagattggtatgaaaggggaacgcagaagaggcaaaggccacgacggactgtaccagggactcagcaccgccaccaaggacacctatgacgctcttcacatgcaggccctgccgcctcgg

SEQ ID NO: 975 - DNA, 1470 bp, Artificial Sequence
  source: /note="Description of Artificial Sequence: Synthetic polynucleotide"
atggccctccctgtcaccgccctgctgcttccgctggctcttctgctccacgccgctcggccccaagtgcaactggtgcaaagcggaggaggattggtcaaacccggaggaagcctgagactgtcatgcgcggcctctggattcaccttctccgattactacatgtcatggatcagacaggccccggggaagggcctcgaatgggtgtcctacatctcgtcctccgggaacaccatctactacgccgacagcgtgaagggccgctttaccatttcccgcgacaacgcaaagaactcgctgtaccttcagatgaattccctgcgggctgaagataccgcggtgtactattgcgcccggtccactatggtccgggaggactactggggacagggcacactcgtgaccgtgtccagcgcgagcgggggtggaggcagcggtggacgcgcctccggcggcggcggttcagacatcgtgctgactcagtcgcccctgtcgctgccggtcaccctgggccaaccggcctcaattagctgcaagtcctcggagagcctggtgcacaactcaggaaagacttacctgaactggttccatcagcggcctggacagtccccacggaggctcatctatgaagtgtccaacagggattcgggggtgcccgaccgcttcactggctccgggtccggcaccgacttcaccttgaaaatctccagagtggaagccgaggacgtgggcgtgtactactgtatgcagggtacccactggcctggaacctttggacaaggaactaagctcgagattaagaccactaccccagcaccgaggccacccaccccggctcctaccatcgcctcccagcctctgtccctgcgtccggaggcatgtagacccgcagctggtggggccgtgcatacccggggtcttgacttcgcctgcgatatctacatttgggcccctctggctggtacttgcggggtcctgctgctttcactcgtgatcactctttactgtaagcgcggtcggaagaagctgctgtacatctttaagcaacccttcatgaggcctgtgcagactactcaagaggaggacggctgttcatgccggttcccagaggaggaggaaggcggctgcgaactgcgcgtgaaattcagccgcagcgcagatgctccagcctacaagcaggggcagaaccagctctacaacgaactcaatcttggtcggagagaggagtacgacgtgctggacaagcggagaggacgggacccagaaatgggcgggaagccgcgcagaaagaatccccaagagggcctgtacaacgagctccaaaaggataagatggcagaagcctatagcgagattggtatgaaaggggaacgcagaagaggcaaaggccacgacggactgtaccagggactcagcaccgccaccaaggacacctatgacgctcttcacatgcaggccctgccgcctcgg

SEQ ID NO: 976 - DNA, 1449 bp, Artificial Sequence
  source: /note="Description of Artificial Sequence: Synthetic polynucleotide"
atggccctccctgtcaccgccctgctgcttccgctggctcttctgctccacgccgctcggccccaagtgcaactcgtggaatctggtggaggactcgtgcaacccggtggaagccttaggctgtcgtgcgccgtcagcgggtttgctctgagcaaccatggaatgtcctgggtccgccgggcaccgggaaaagggctggaatgggtgtccggcatcgtgtacagcgggtcaacctattacgccgcgtccgtgaagggcagattcactatctcaagagacaacagccggaacaccctgtacttgcaaatgaattccctgcgccccgaggacaccgccatctactactgctccgcccacggaggagagtcggacgtgtggggccagggaacgactgtgactgtgtccagcgcatcaggagggggtggttcgggcggccgggcctcggggggaggaggttccgacattcggctgacccagtccccgtccccactgtcggcctccgtcggcgaccgcgtgaccatcacttgtcaggcgtccgaggacattaacaagttcctgaactggtaccaccagacccctggaaaggcccccaagctgctgatctacgatgcctcgacccttcaaactggagtgcctagccggttctccgggtccggctccggcactgatttcactctgaccatcaactcattgcagccggaagatatcgggacctactattgccagcagtacgaatccctcccgctcacattcggcgggggaaccaaggtcgagattaagaccactaccccagcaccgaggccacccaccccggctcctaccatcgcctcccagcctctgtccctgcgtccggaggcatgtagacccgcagctggtggggccgtgcatacccggggtcttgacttcgcctgcgatatctacatttgggcccctctggctggtacttgcggggtcctgctgctttcactcgtgatcactctttactgtaagcgcggtcggaagaagctgctgtacatctttaagcaacccttcatgaggcctgtgcagactactcaagaggaggacggctgttcatgccggttcccagaggaggaggaaggcggctgcgaactgcgcgtgaaattcagccgcagcgcagatgctccagcctacaagcaggggcagaaccagctctacaacgaactcaatcttggtcggagagaggagtacgacgtgctggacaagcggagaggacgggacccagaaatgggcgggaagccgcgcagaaagaatccccaagagggcctgtacaacgagctccaaaaggataagatggcagaagcctatagcgagattggtatgaaaggggaacgcagaagaggcaaaggccacgacggactgtaccagggactcagcaccgccaccaaggacacctatgacgctcttcacatgcaggccctgccgcctcgg

SEQ ID NO: 977 - DNA, 1452 bp, Artificial Sequence
  source: /note="Description of Artificial Sequence: Synthetic polynucleotide"
atggccctccctgtcaccgccctgctgcttccgctggctcttctgctccacgccgctcggcccgaagtgcaattggtggaaactggaggaggacttgtgcaacctggaggatcattgcggctctcatgcgctgtctccggcttcgccctgtcaaatcacgggatgtcgtgggtcagacgggccccgggaaagggtctggaatgggtgtcggggattgtgtacagcggctccacctactacgccgcttcggtcaagggccgcttcactatttcacgggacaacagccgcaacaccctctatctgcaaatgaactctctccgcccggaggataccgccatctactactgctccgcacacggcggcgaatccgacgtgtggggacagggaaccactgtcaccgtgtcgtccgcatccggtggcggaggatcgggtggccgggcctccgggggcggcggcagcgagactaccctgacccagtcccctgccactctgtccgtgagcccgggagagagagccacccttagctgccgggccagccagagcgtgggctccaacctggcctggtaccagcagaagccaggacagggtcccaggctgctgatctacggagcctccactcgcgcgaccggcatccccgcgaggttctccgggtcgggttccgggaccgagttcaccctgaccatctcctccctccaaccggaggacttcgcggtgtactactgtcagcagtacaacgattggctgcccgtgacatttggacaggggacgaaggtggaaatcaaaaccactaccccagcaccgaggccacccaccccggctcctaccatcgcctcccagcctctgtccctgcgtccggaggcatgtagacccgcagctggtggggccgtgcatacccggggtcttgacttcgcctgcgatatctacatttgggcccctctggctggtacttgcggggtcctgctgctttcactcgtgatcactctttactgtaagcgcggtcggaagaagctgctgtacatctttaagcaacccttcatgaggcctgtgcagactactcaagaggaggacggctgttcatgccggttcccagaggaggaggaaggcggctgcgaactgcgcgtgaaattcagccgcagcgcagatgctccagcctacaagcaggggcagaaccagctctacaacgaactcaatcttggtcggagagaggagtacgacgtgctggacaagcggagaggacgggacccagaaatgggcgggaagccgcgcagaaagaatccccaagagggcctgtacaacgagctccaaaaggataagatggcagaagcctatagcgagattggtatgaaaggggaacgcagaagaggcaaaggccacgacggactgtaccagggactcagcaccgccaccaaggacacctatgacgctcttcacatgcaggccctgccgcctcgg

SEQ ID NO: 978 - DNA, 1455 bp, Artificial Sequence
  source: /note="Description of Artificial Sequence: Synthetic polynucleotide"
atggccctccctgtcaccgccctgctgcttccgctggctcttctgctccacgccgctcggcccgaagtgcaattggtggaatctggtggaggacttgtgcaacctggaggatcactgagactgtcatgcgcggtgtccggttttgccctgagcaatcatgggatgtcgtgggtccggcgcgcccccggaaagggtctggaatgggtgtcgggtatcgtctactccgggagcacttactacgccgcgagcgtgaagggccgcttcaccatttcccgcgataactcccgcaacaccctgtacttgcaaatgaactcgctccggcctgaggacactgccatctactactgctccgcacacggaggagaatccgacgtgtggggccagggaactaccgtgaccgtcagcagcgcctccggcggcgggggctcaggcggacgggctagcggcggcggtggctccgagatcgtgctgacccagtcgcctggcactctctcgctgagccccggggaaagggcaaccctgtcctgtcgggccagccagtccattggatcatcctccctcgcctggtatcagcagaaaccgggacaggctccgcggctgcttatgtatggggccagctcaagagcctccggcattcccgaccggttctccgggtccggttccggcaccgatttcaccctgactatctcgaggctggagccagaggacttcgccgtgtactactgccagcagtacgcggggtccccgccgttcacgttcggacagggaaccaaggtcgagatcaagaccactaccccagcaccgaggccacccaccccggctcctaccatcgcctcccagcctctgtccctgcgtccggaggcatgtagacccgcagctggtggggccgtgcatacccggggtcttgacttcgcctgcgatatctacatttgggcccctctggctggtacttgcggggtcctgctgctttcactcgtgatcactctttactgtaagcgcggtcggaagaagctgctgtacatctttaagcaacccttcatgaggcctgtgcagactactcaagaggaggacggctgttcatgccggttcccagaggaggaggaaggcggctgcgaactgcgcgtgaaattcagccgcagcgcagatgctccagcctacaagcaggggcagaaccagctctacaacgaactcaatcttggtcggagagaggagtacgacgtgctggacaagcggagaggacgggacccagaaatgggcgggaagccgcgcagaaagaatccccaagagggcctgtacaacgagctccaaaaggataagatggcagaagcctatagcgagattggtatgaaaggggaacgcagaagaggcaaaggccacgacggactgtaccagggactcagcaccgccaccaaggacacctatgacgctcttcacatgcaggccctgccgcctcgg

SEQ ID NO: 979 - protein, 487 aa, Artificial Sequence
  source: /note="Description of Artificial Sequence: Synthetic polypeptide"
MALPVTALLLPLALLLHAARPQVQLQESGPGLVKPSETLSLTCTVSGGSISSSYYYWGWIRQPPGKGLEWIGSIYYSGSAYYNPSLKSRVTISVDTSKNQFSLRLSSVTAADTAVYYCARHWQEWPDAFDIWGQGTMVTVSSGGGGSGGGGSGGGGSETTLTQSPAFMSATPGDKVIISCKASQDIDDAMNWYQQKPGEAPLFIIQSATSPVPGIPPRFSGSGFGTDFSLTINNIESEDAAYYFCLQHDNFPLTFGQGTKLEIKTTTPAPRPPTPAPTIASQPLSLRPEACRPAAGGAVHTRGLDFACDIYIWAPLAGTCGVLLLSLVITLYCKRGRKKLLYIFKQPFMRPVQTTQEEDGCSCRFPEEEEGGCELRVKFSRSADAPAYKQGQNQLYNELNLGRREEYDVLDKRRGRDPEMGGKPRRKNPQEGLYNELQKDKMAEAYSEIGMKGERRRGKGHDGLYQGLSTATKDTYDALHMQALPPR

SEQ ID NO: 980 - protein, 489 aa, Artificial Sequence
  source: /note="Description of Artificial Sequence: Synthetic polypeptide"
MALPVTALLLPLALLLHAARPQVNLRESGPALVKPTQTLTLTCTFSGFSLRTSGMCVSWIRQPPGKALEWLARIDWDEDKFYSTSLKTRLTISKDTSDNQVVLRMTNMDPADTATYYCARSGAGGTSATAFDIWGPGTMVTVSSGGGGSGGGGSGGGGSDIQMTQSPSSLSASVGDRVTITCRASQDIYNNLAWFQLKPGSAPRSLMYAANKSQSGVPSRFSGSASGTDFTLTISSLQPEDFATYYCQHYYRFPYSFGQGTKLEIKTTTPAPRPPTPAPTIASQPLSLRPEACRPAAGGAVHTRGLDFACDIYIWAPLAGTCGVLLLSLVITLYCKRGRKKLLYIFKQPFMRPVQTTQEEDGCSCRFPEEEEGGCELRVKFSRSADAPAYKQGQNQLYNELNLGRREEYDVLDKRRGRDPEMGGKPRRKNPQEGLYNELQKDKMAEAYSEIGMKGERRRGKGHDGLYQGLSTATKDTYDALHMQALPPR

SEQ ID NO: 981 - protein, 490 aa, Artificial Sequence
  source: /note="Description of Artificial Sequence: Synthetic polypeptide"
MALPVTALLLPLALLLHAARPEVQLVESGGGLVKPGGSLRLSCAASGFTFSSYSMNWVRQAPGKGLEWVSSISSSSSYIYYADSVKGRFTISRDNAKNSLYLQMNSLRAEDTAVYYCAKTIAAVYAFDIWGQGTTVTVSSGGGGSGGGGSGGGGSEIVLTQSPLSLPVTPEEPASISCRSSQSLLHSNGYNYLDWYLQKPGQSPQLLIYLGSNRASGVPDRFSGSGSGTDFTLKISRVEAEDVGVYYCMQALQTPYTFGQGTKLEIKTTTPAPRPPTPAPTIASQPLSLRPEACRPAAGGAVHTRGLDFACDIYIWAPLAGTCGVLLLSLVITLYCKRGRKKLLYIFKQPFMRPVQTTQEEDGCSCRFPEEEEGGCELRVKFSRSADAPAYKQGQNQLYNELNLGRREEYDVLDKRRGRDPEMGGKPRRKNPQEGLYNELQKDKMAEAYSEIGMKGERRRGKGHDGLYQGLSTATKDTYDALHMQALPPR

SEQ ID NO: 982 - protein, 484 aa, Artificial Sequence
  source: /note="Description of Artificial Sequence: Synthetic polypeptide"
MALPVTALLLPLALLLHAARPEVQLVESGGGLVKPGGSLRLSCAASGFTFSDYYMSWIRQAPGKGLEWVSYISSSGSTIYYADSVKGRFTISRDNAKNSLYLQMNSLRAEDTAVYYCARDLRGAFDIWGQGTMVTVSSGGGGSGGGGSGGGGSSYVLTQSPSVSAAPGYTATISCGGNNIGTKSVHWYQQKPGQAPLLVIRDDSVRPSKIPGRFSGSNSGNMATLTISGVQAGDEADFYCQVWDSDSEHVVFGGGTKLTVLTTTPAPRPPTPAPTIASQPLSLRPEACRPAAGGAVHTRGLDFACDIYIWAPLAGTCGVLLLSLVITLYCKRGRKKLLYIFKQPFMRPVQTTQEEDGCSCRFPEEEEGGCELRVKFSRSADAPAYKQGQNQLYNELNLGRREEYDVLDKRRGRDPEMGGKPRRKNPQEGLYNELQKDKMAEAYSEIGMKGERRRGKGHDGLYQGLSTATKDTYDALHMQALPPR

SEQ ID NO: 983 - protein, 485 aa, Artificial Sequence
  source: /note="Description of Artificial Sequence: Synthetic polypeptide"
MALPVTALLLPLALLLHAARPQVQLVQSGAEVKKPGASVKVSCKPSGYTVTSHYIHWVRRAPGQGLEWMGMINPSGGVTAYSQTLQGRVTMTSDTSSSTVYMELSSLRSEDTAMYYCAREGSGSGWYFDFWGRGTLVTVSSGGGGSGGGGSGGGGSSYVLTQPPSVSVSPGQTASITCSGDGLSKKYVSWYQQKAGQSPVVLISRDKERPSGIPDRFSGSNSADTATLTISGTQAMDEADYYCQAWDDTTVVFGGGTKLTVLTTTPAPRPPTPAPTIASQPLSLRPEACRPAAGGAVHTRGLDFACDIYIWAPLAGTCGVLLLSLVITLYCKRGRKKLLYIFKQPFMRPVQTTQEEDGCSCRFPEEEEGGCELRVKFSRSADAPAYKQGQNQLYNELNLGRREEYDVLDKRRGRDPEMGGKPRRKNPQEGLYNELQKDKMAEAYSEIGMKGERRRGKGHDGLYQGLSTATKDTYDALHMQALPPR

SEQ ID NO: 984 - protein, 489 aa, Artificial Sequence
  source: /note="Description of Artificial Sequence: Synthetic polypeptide"
MALPVTALLLPLALLLHAARPQVQLQESGPGLVKPSQTLSLTCTVSGGSISSGGYYWSWIRQHPGKGLEWIGYIYYSGSTYYNPSLKSRVTISVDTSKNQFSLKLSSVTAADTAVYYCARAGIAARLRGAFDIWGQGTMVTVSSGGGGSGGGGSGGGGSDIVMTQSPSSVSASVGDRVIITCRASQGIRNWLAWYQQKPGKAPNLLIYAASNLQSGVPSRFSGSGSGADFTLTISSLQPEDVATYYCQKYNSAPFTFGPGTKVDIKTTTPAPRPPTPAPTIASQPLSLRPEACRPAAGGAVHTRGLDFACDIYIWAPLAGTCGVLLLSLVITLYCKRGRKKLLYIFKQPFMRPVQTTQEEDGCSCRFPEEEEGGCELRVKFSRSADAPAYKQGQNQLYNELNLGRREEYDVLDKRRGRDPEMGGKPRRKNPQEGLYNELQKDKMAEAYSEIGMKGERRRGKGHDGLYQGLSTATKDTYDALHMQALPPR

SEQ ID NO: 985 - protein, 497 aa, Artificial Sequence
  source: /note="Description of Artificial Sequence: Synthetic polypeptide"
MALPVTALLLPLALLLHAARPQVQLVQSGAEVKKPGSSVKVSCKASGGTFSSYAISWVRQAPGQGLEWMGGIIPIFGTANYAQKFQGRVTITADESTSTAYMELSSLRSEDTAVYYCARRGGYQLLRWDVGLLRSAFDIWGQGTMVTVSSGGGGSGGGGSGGGGSSYVLTQPPSVSVAPGQTARITCGGNNIGSKSVHWYQQKPGQAPVLVLYGKNNRPSGVPDRFSGSRSGTTASLTITGAQAEDEADYYCSSRDSSGDHLRVFGTGTKVTVLTTTPAPRPPTPAPTIASQPLSLRPEACRPAAGGAVHTRGLDFACDIYIWAPLAGTCGVLLLSLVITLYCKRGRKKLLYIFKQPFMRPVQTTQEEDGCSCRFPEEEEGGCELRVKFSRSADAPAYKQGQNQLYNELNLGRREEYDVLDKRRGRDPEMGGKPRRKNPQEGLYNELQKDKMAEAYSEIGMKGERRRGKGHDGLYQGLSTATKDTYDALHMQALPPR

SEQ ID NO: 986 - protein, 492 aa, Artificial Sequence
  source: /note="Description of Artificial Sequence: Synthetic polypeptide"
MALPVTALLLPLALLLHAARPEVQLQQSGPGLVKPSQTLSLTCAISGDSVSSNSAAWNWIRQSPSRGLEWLGRTYYRSKWYSFYAISLKSRIIINPDTSKNQFSLQLKSVTPEDTAVYYCARSSPEGLFLYWFDPWGQGTLVTVSSGGDGSGGGGSGGGGSSSELTQDPAVSVALGQTIRITCQGDSLGNYYATWYQQKPGQAPVLVIYGTNNRPSGIPDRFSASSSGNTASLTITGAQAEDEADYYCNSRDSSGHHLLFGTGTKVTVLTTTPAPRPPTPAPTIASQPLSLRPEACRPAAGGAVHTRGLDFACDIYIWAPLAGTCGVLLLSLVITLYCKRGRKKLLYIFKQPFMRPVQTTQEEDGCSCRFPEEEEGGCELRVKFSRSADAPAYKQGQNQLYNELNLGRREEYDVLDKRRGRDPEMGGKPRRKNPQEGLYNELQKDKMAEAYSEIGMKGERRRGKGHDGLYQGLSTATKDTYDALHMQALPPR

SEQ ID NO: 987 - protein, 490 aa, Artificial Sequence
  source: /note="Description of Artificial Sequence: Synthetic polypeptide"
MALPVTALLLPLALLLHAARPEVQLVESGGGLVQPGGSLRLSCAASGFTFSSYAMSWVRQAPGKGLEWVSAISGSGGSTYYADSVKGRFTISRDNSKNTLYLQMNSLRAEDTAVYYCAKVEGSGSLDYWGQGTLVTVSSGGGGSGGGGSGGGGSEIVMTQSPGTLSLSPGERATLSCRASQSVSSAYLAWYQQKPGQPPRLLISGASTRATGIPDRFGGSGSGTDFTLTISRLEPEDFAVYYCQHYGSSFNGSSLFTFGQGTRLEIKTTTPAPRPPTPAPTIASQPLSLRPEACRPAAGGAVHTRGLDFACDIYIWAPLAGTCGVLLLSLVITLYCKRGRKKLLYIFKQPFMRPVQTTQEEDGCSCRFPEEEEGGCELRVKFSRSADAPAYKQGQNQLYNELNLGRREEYDVLDKRRGRDPEMGGKPRRKNPQEGLYNELQKDKMAEAYSEIGMKGERRRGKGHDGLYQGLSTATKDTYDALHMQALPPR

SEQ ID NO: 988 - protein, 485 aa, Artificial Sequence
  source: /note="Description of Artificial Sequence: Synthetic polypeptide"
MALPVTALLLPLALLLHAARPEVQLVETGGGLVQPGGSLRLSCAASGITFSRYPMSWVRQAPGKGLEWVSGISDSGVSTYYADSAKGRFTISRDNSKNTLFLQMSSLRDEDTAVYYCVTRAGSEASDIWGQGTMVTVSSGGGGSGGGGSGGGGSEIVLTQSPATLSLSPGERATLSCRASQSVSNSLAWYQQKPGQAPRLLIYDASSRATGIPDRFSGSGSGTDFTLTISRLEPEDFAIYYCQQFGTSSGLTFGGGTKLEIKTTTPAPRPPTPAPTIASQPLSLRPEACRPAAGGAVHTRGLDFACDIYIWAPLAGTCGVLLLSLVITLYCKRGRKKLLYIFKQPFMRPVQTTQEEDGCSCRFPEEEEGGCELRVKFSRSADAPAYKQGQNQLYNELNLGRREEYDVLDKRRGRDPEMGGKPRRKNPQEGLYNELQKDKMAEAYSEIGMKGERRRGKGHDGLYQGLSTATKDTYDALHMQALPPR

SEQ ID NO: 989 - protein, 492 aa, Artificial Sequence
  source: /note="Description of Artificial Sequence: Synthetic polypeptide"
MALPVTALLLPLALLLHAARPQVQLVESGGGLVQPGGSLRLSCAASGFTFSSYAMSWVRQAPGKGLEWVSAISGSGGSTYYADSVKGRFTISRDNAKNSLYLQMNSLRAEDTAIYYCARATYKRELRYYYGMDVWGQGTMVTVSSGGGGSGGGGSGGGGSEIVMTQSPGTVSLSPGERATLSCRASQSVSSSFLAWYQQKPGQAPRLLIYGASSRATGIPDRFSGSGSGTDFTLTISRLEPEDSAVYYCQQYHSSPSWTFGQGTRLEIKTTTPAPRPPTPAPTIASQPLSLRPEACRPAAGGAVHTRGLDFACDIYIWAPLAGTCGVLLLSLVITLYCKRGRKKLLYIFKQPFMRPVQTTQEEDGCSCRFPEEEEGGCELRVKFSRSADAPAYKQGQNQLYNELNLGRREEYDVLDKRRGRDPEMGGKPRRKNPQEGLYNELQKDKMAEAYSEIGMKGERRRGKGHDGLYQGLSTATKDTYDALHMQALPPR

SEQ ID NO: 990 - protein, 492 aa, Artificial Sequence
  source: /note="Description of Artificial Sequence: Synthetic polypeptide"
MALPVTALLLPLALLLHAARPEVQLVETGGGLVQPGGSLRLSCAASGFTFSSYAMSWVRQAPGKGLEWVSAISGSGGSTYYADSVKGRFTISRDNSKNTLYLQMNTLKAEDTAVYYCARATYKRELRYYYGMDVWGQGTTVTVSSGGGGSGGGGSGGGGSEIVLTQSPSTLSLSPGESATLSCRASQSVSTTFLAWYQQKPGQAPRLLIYGSSNRATGIPDRFSGSGSGTDFTLTIRRLEPEDFAVYYCQQYHSSPSWTFGQGTKVEIKTTTPAPRPPTPAPTIASQPLSLRPEACRPAAGGAVHTRGLDFACDIYIWAPLAGTCGVLLLSLVITLYCKRGRKKLLYIFKQPFMRPVQTTQEEDGCSCRFPEEEEGGCELRVKFSRSADAPAYKQGQNQLYNELNLGRREEYDVLDKRRGRDPEMGGKPRRKNPQEGLYNELQKDKMAEAYSEIGMKGERRRGKGHDGLYQGLSTATKDTYDALHMQALPPR

SEQ ID NO: 991 - protein, 483 aa, Artificial Sequence
  source: /note="Description of Artificial Sequence: Synthetic polypeptide"
MALPVTALLLPLALLLHAARPEVQLVETGGGLVQPGRSLRLSCAASGFTFDDYAMHWVRQAPGKGLEWVSGISWNSGSIGYADSVKGRFTISRDNAKNSLYLQMNSLRDEDTAVYYCARVGKAVPDVWGQGTTVTVSSGGGGSGGGGSGGGGSDIVMTQTPSSLSASVGDRVTITCRASQSISSYLNWYQQKPGKAPKLLIYAASSLQSGVPSRFSGSGSGTDFTLTISSLQPEDFATYYCQQSYSTPYSFGQGTRLEIKTTTPAPRPPTPAPTIASQPLSLRPEACRPAAGGAVHTRGLDFACDIYIWAPLAGTCGVLLLSLVITLYCKRGRKKLLYIFKQPFMRPVQTTQEEDGCSCRFPEEEEGGCELRVKFSRSADAPAYKQGQNQLYNELNLGRREEYDVLDKRRGRDPEMGGKPRRKNPQEGLYNELQKDKMAEAYSEIGMKGERRRGKGHDGLYQGLSTATKDTYDALHMQALPPR

SEQ ID NO: 992 - protein, 490 aa, Artificial Sequence
  source: /note="Description of Artificial Sequence: Synthetic polypeptide"
MALPVTALLLPLALLLHAARPEVQLVESGGGLVQPGRSLRLSCTASGFTFDDYAMHWVRQRPGKGLEWVASINWKGNSLAYGDSVKGRFAISRDNAKNTVFLQMNSLRTEDTAVYYCASHQGVAYYNYAMDVWGRGTLVTVSSGGGGSGGGGSGGGGSEIVLTQSPGTLSLSPGERATLSCRATQSIGSSFLAWYQQRPGQAPRLLIYGASQRATGIPDRFSGRGSGTDFTLTISRVEPEDSAVYYCQHYESSPSWTFGQGTKVEIKTTTPAPRPPTPAPTIASQPLSLRPEACRPAAGGAVHTRGLDFACDIYIWAPLAGTCGVLLLSLVITLYCKRGRKKLLYIFKQPFMRPVQTTQEEDGCSCRFPEEEEGGCELRVKFSRSADAPAYKQGQNQLYNELNLGRREEYDVLDKRRGRDPEMGGKPRRKNPQEGLYNELQKDKMAEAYSEIGMKGERRRGKGHDGLYQGLSTATKDTYDALHMQALPPR

SEQ ID NO: 993 - protein, 485 aa, Artificial Sequence
  source: /note="Description of Artificial Sequence: Synthetic polypeptide"
MALPVTALLLPLALLLHAARPEVQLVESGGGLVQPGGSLRLSCAASGFTFSSYAMSWVRQAPGKGLEWVSAISGSGGSTYYADSVKGRFTISRDNSKNTLYLQMNSLRAEDTAVYYCAKVVRDGMDVWGQGTTVTVSSGGGGSGGGGSGGGGSEIVLTQSPATLSLSPGERATLSCRASQSVSSSYLAWYQQKPGQAPRLLIYGASSRATGIPDRFSGNGSGTDFTLTISRLEPEDFAVYYCQQYGSPPRFTFGPGTKVDIKTTTPAPRPPTPAPTIASQPLSLRPEACRPAAGGAVHTRGLDFACDIYIWAPLAGTCGVLLLSLVITLYCKRGRKKLLYIFKQPFMRPVQTTQEEDGCSCRFPEEEEGGCELRVKFSRSADAPAYKQGQNQLYNELNLGRREEYDVLDKRRGRDPEMGGKPRRKNPQEGLYNELQKDKMAEAYSEIGMKGERRRGKGHDGLYQGLSTATKDTYDALHMQALPPR

SEQ ID NO: 994 - protein, 486 aa, Artificial Sequence
  source: /note="Description of Artificial Sequence: Synthetic polypeptide"
MALPVTALLLPLALLLHAARPEVQLLESGGGLVQPGGSLRLSCAASGFTFSSYAMSWVRQAPGKGLEWVSAISGSGGSTYYADSVKGRFTISRDNSKNTLYLQMNSLRAEDTAVYYCAKIPQTGTFDYWGQGTLVTVSSGGGGSGGGGSGGGGSEIVLTQSPGTLSLSPGERATLSCRASQSVSSSYLAWYQQRPGQAPRLLIYGASSRATGIPDRFSGSGSGTDFTLTISRLEPEDFAVYYCQHYGSSPSWTFGQGTRLEIKTTTPAPRPPTPAPTIASQPLSLRPEACRPAAGGAVHTRGLDFACDIYIWAPLAGTCGVLLLSLVITLYCKRGRKKLLYIFKQPFMRPVQTTQEEDGCSCRFPEEEEGGCELRVKFSRSADAPAYKQGQNQLYNELNLGRREEYDVLDKRRGRDPEMGGKPRRKNPQEGLYNELQKDKMAEAYSEIGMKGERRRGKGHDGLYQGLSTATKDTYDALHMQALPPR

SEQ ID NO: 995 - protein, 492 aa, Artificial Sequence
  source: /note="Description of Artificial Sequence: Synthetic polypeptide"
MALPVTALLLPLALLLHAARPEVQLVETGGGLVQPGGSLRLSCAASGFTFSSYAMSWVRQAPGKGLEWVSAISGSGGSTYYADSVKGRFTMSRENDKNSVFLQMNSLRVEDTGVYYCARANYKRELRYYYGMDVWGQGTMVTVSSGGGGSGGGGSGGGGSEIVMTQSPGTLSLSPGESATLSCRASQRVASNYLAWYQHKPGQAPSLLISGASSRATGVPDRFSGSGSGTDFTLAISRLEPEDSAVYYCQHYDSSPSWTFGQGTKVEIKTTTPAPRPPTPAPTIASQPLSLRPEACRPAAGGAVHTRGLDFACDIYIWAPLAGTCGVLLLSLVITLYCKRGRKKLLYIFKQPFMRPVQTTQEEDGCSCRFPEEEEGGCELRVKFSRSADAPAYKQGQNQLYNELNLGRREEYDVLDKRRGRDPEMGGKPRRKNPQEGLYNELQKDKMAEAYSEIGMKGERRRGKGHDGLYQGLSTATKDTYDALHMQALPPR

SEQ ID NO: 996 - protein, 488 aa, Artificial Sequence
  source: /note="Description of Artificial Sequence: Synthetic polypeptide"
MALPVTALLLPLALLLHAARPEVQLLETGGGLVQPGGSLRLSCAASGFSFSSYAMSWVRQAPGKGLEWVSAISGSGGSTYYADSVKGRFTISRDNSKNTLYLQMNSLRAEDTAVYYCAKALVGATGAFDIWGQGTLVTVSSGGGGSGGGGSGGGGSEIVLTQSPGTLSLSPGERATLSCRASQSLSSNFLAWYQQKPGQAPGLLIYGASNWATGTPDRFSGSGSGTDFTLTITRLEPEDFAVYYCQYYGTSPMYTFGQGTKVEIKTTTPAPRPPTPAPTIASQPLSLRPEACRPAAGGAVHTRGLDFACDIYIWAPLAGTCGVLLLSLVITLYCKRGRKKLLYIFKQPFMRPVQTTQEEDGCSCRFPEEEEGGCELRVKFSRSADAPAYKQGQNQLYNELNLGRREEYDVLDKRRGRDPEMGGKPRRKNPQEGLYNELQKDKMAEAYSEIGMKGERRRGKGHDGLYQGLSTATKDTYDALHMQALPPR

SEQ ID NO: 997 - protein, 488 aa, Artificial Sequence
  source: /note="Description of Artificial Sequence: Synthetic polypeptide"
MALPVTALLLPLALLLHAARPEVQLLESGGGLVQPGGSLRLSCAASGFTFSSYAMSWVRQAPGKGLEWVSAISGSGGSTYYADSVKGRFTISRDNSKNTLYLQMNSLRAEDTAVYYCVLWFGEGFDPWGQGTLVTVSSGGGGSGGGGSGGGGSDIVLTQSPLSLPVTPGEPASISCRSSQSLLHSNGYNYLDWYLQKPGQSPQLLIYLGSNRASGVPDRFSGSGSGTDFTLKISRVEAEDVGVYYCMQALQTPLTFGGGTKVDIKTTTPAPRPPTPAPTIASQPLSLRPEACRPAAGGAVHTRGLDFACDIYIWAPLAGTCGVLLLSLVITLYCKRGRKKLLYIFKQPFMRPVQTTQEEDGCSCRFPEEEEGGCELRVKFSRSADAPAYKQGQNQLYNELNLGRREEYDVLDKRRGRDPEMGGKPRRKNPQEGLYNELQKDKMAEAYSEIGMKGERRRGKGHDGLYQGLSTATKDTYDALHMQALPPR

SEQ ID NO: 998 - protein, 495 aa, Artificial Sequence
  source: /note="Description of Artificial Sequence: Synthetic polypeptide"
MALPVTALLLPLALLLHAARPQVQLVESGGGLVQPGGSLRLSCAASGFTFSSYAMSWVRQAPGKGLEWVSAISGSGGSTYYADSVKGRFTISRDNSKNTLYLQMNSLRAEDTAVYYCAKVGYDSSGYYRDYYGMDVWGQGTTVTVSSGGGGSGGGGSGGGGSEIVLTQSPGTLSLSPGERATLSCRASQSVSSSYLAWYQQKPGQAPRLLIYGTSSRATGISDRFSGSGSGTDFTLTISRLEPEDFAVYYCQHYGNSPPKFTFGPGTKLEIKTTTPAPRPPTPAPTIASQPLSLRPEACRPAAGGAVHTRGLDFACDIYIWAPLAGTCGVLLLSLVITLYCKRGRKKLLYIFKQPFMRPVQTTQEEDGCSCRFPEEEEGGCELRVKFSRSADAPAYKQGQNQLYNELNLGRREEYDVLDKRRGRDPEMGGKPRRKNPQEGLYNELQKDKMAEAYSEIGMKGERRRGKGHDGLYQGLSTATKDTYDALHMQALPPR

SEQ ID NO: 999 - protein, 490 aa, Artificial Sequence
  source: /note="Description of Artificial Sequence: Synthetic polypeptide"
MALPVTALLLPLALLLHAARPEVQLVESGGGLVQPGGSLRLSCAASGFTFSSYAMSWVRQAPGKGLEWVSAISGSGGSTYYADSVKGRFTISRDNSKNTLYLQMNSLRAEDTAVYYCAKMGWSSGYLGAFDIWGQGTTVTVSSGGGGSGGGGSGGGGSEIVLTQSPGTLSLSPGERATLSCRASQSVASSFLAWYQQKPGQAPRLLIYGASGRATGIPDRFSGSGSGTDFTLTISRLEPEDFAVYYCQHYGGSPRLTFGGGTKVDIKTTTPAPRPPTPAPTIASQPLSLRPEACRPAAGGAVHTRGLDFACDIYIWAPLAGTCGVLLLSLVITLYCKRGRKKLLYIFKQPFMRPVQTTQEEDGCSCRFPEEEEGGCELRVKFSRSADAPAYKQGQNQLYNELNLGRREEYDVLDKRRGRDPEMGGKPRRKNPQEGLYNELQKDKMAEAYSEIGMKGERRRGKGHDGLYQGLSTATKDTYDALHMQALPPR

SEQ ID NO: 1000 - skipped

SEQ ID NO: 1001 - DNA, 1461 bp, Artificial Sequence
  source: /note="Description of Artificial Sequence: Synthetic polynucleotide"
atggccctccctgtcaccgccctgctgcttccgctggctcttctgctccacgccgctcggccccaagtgcagcttcaggaaagcggaccgggcctggtcaagccatccgaaactctctccctgacttgcactgtgtctggcggttccatctcatcgtcgtactactactggggctggattaggcagccgcccggaaagggactggagtggatcggaagcatctactattccggctcggcgtactacaaccctagcctcaagtcgagagtgaccatctccgtggatacctccaagaaccagttttccctgcgcctgagctccgtgaccgccgctgacaccgccgtgtactactgtgctcggcattggcaggaatggcccgatgccttcgacatttggggccagggcactatggtcactgtgtcatccgggggtggaggcagcgggggaggagggtccggggggggaggttcagagacaaccttgacccagtcacccgcattcatgtccgccactccgggagacaaggtcatcatctcgtgcaaagcgtcccaggatatcgacgatgccatgaattggtaccagcagaagcctggcgaagcgccgctgttcattatccaatccgcaacctcgcccgtgcctggaatcccaccgcggttcagcggcagcggtttcggaaccgacttttccctgaccattaacaacattgagtccgaggacgccgcctactacttctgcctgcaacacgacaacttccctctcacgttcggccagggaaccaagctggaaatcaagaccactaccccagcaccgaggccacccaccccggctcctaccatcgcctcccagcctctgtccctgcgtccggaggcatgtagacccgcagctggtggggccgtgcatacccggggtcttgacttcgcctgcgatatctacatttgggcccctctggctggtacttgcggggtcctgctgctttcactcgtgatcactctttactgtaagcgcggtcggaagaagctgctgtacatctttaagcaacccttcatgaggcctgtgcagactactcaagaggaggacggctgttcatgccggttcccagaggaggaggaaggcggctgcgaactgcgcgtgaaattcagccgcagcgcagatgctccagcctacaagcaggggcagaaccagctctacaacgaactcaatcttggtcggagagaggagtacgacgtgctggacaagcggagaggacgggacccagaaatgggcgggaagccgcgcagaaagaatccccaagagggcctgtacaacgagctccaaaaggataagatggcagaagcctatagcgagattggtatgaaaggggaacgcagaagaggcaaaggccacgacggactgtaccagggactcagcaccgccaccaaggacacctatgacgctcttcacatgcaggccctgccgcctcgg

SEQ ID NO: 1002 - DNA, 1467 bp, Artificial Sequence
  source: /note="Description of Artificial Sequence: Synthetic polynucleotide"
atggccctccctgtcaccgccctgctgcttccgctggctcttctgctccacgccgctcggccccaagtcaatctgcgcgaatccggccccgccttggtcaagcctacccagaccctcactctgacctgtactttctccggcttctccctgcggacttccgggatgtgcgtgtcctggatcagacagcctccgggaaaggccctggagtggctcgctcgcattgactgggatgaggacaagttctactccacctcactcaagaccaggctgaccatcagcaaagatacctctgacaaccaagtggtgctccgcatgaccaacatggacccagccgacactgccacttactactgcgcgaggagcggagcgggcggaacctccgccaccgccttcgatatttggggcccgggtaccatggtcaccgtgtcaagcggaggaggggggtccgggggcggcggttccgggggaggcggatcggacattcagatgactcagtcaccatcgtccctgagcgctagcgtgggcgacagagtgacaatcacttgccgggcatcccaggacatctataacaaccttgcgtggttccagctgaagcctggttccgcaccgcggtcacttatgtacgccgccaacaagagccagtcgggagtgccgtcccggttttccggttcggcctcgggaactgacttcaccctgacgatctccagcctgcaacccgaggatttcgccacctactactgccagcactactaccgctttccctactcgttcggacagggaaccaagctggaaatcaagaccactaccccagcaccgaggccacccaccccggctcctaccatcgcctcccagcctctgtccctgcgtccggaggcatgtagacccgcagctggtggggccgtgcatacccggggtcttgacttcgcctgcgatatctacatttgggcccctctggctggtacttgcggggtcctgctgctttcactcgtgatcactctttactgtaagcgcggtcggaagaagctgctgtacatctttaagcaacccttcatgaggcctgtgcagactactcaagaggaggacggctgttcatgccggttcccagaggaggaggaaggcggctgcgaactgcgcgtgaaattcagccgcagcgcagatgctccagcctacaagcaggggcagaaccagctctacaacgaactcaatcttggtcggagagaggagtacgacgtgctggacaagcggagaggacgggacccagaaatgggcgggaagccgcgcagaaagaatccccaagagggcctgtacaacgagctccaaaaggataagatggcagaagcctatagcgagattggtatgaaaggggaacgcagaagaggcaaaggccacgacggactgtaccagggactcagcaccgccaccaaggacacctatgacgctcttcacatgcaggccctgccgcctcgg

SEQ ID NO: 1003 - DNA, 1470 bp, Artificial Sequence
  source: /note="Description of Artificial Sequence: Synthetic polynucleotide"
atggccctccctgtcaccgccctgctgcttccgctggctcttctgctccacgccgctcggcccgaagtgcagcttgtcgaatccggggggggactggtcaagccgggcggatcactgagactgtcctgcgccgcgagcggcttcacgttctcctcctactccatgaactgggtccgccaagcccccgggaagggactggaatgggtgtcctctatctcctcgtcgtcgtcctacatctactacgccgactccgtgaagggaagattcaccatttcccgcgacaacgcaaagaactcactgtacttgcaaatgaactcactccgggccgaagatactgctgtgtactattgcgccaagactattgccgccgtctacgctttcgacatctggggccagggaaccaccgtgactgtgtcgtccggtggtggtggctcgggcggaggaggaagcggcggcggggggtccgagattgtgctgacccagtcgccactgagcctccctgtgacccccgaggaacccgccagcatcagctgccggtccagccagtccctgctccactccaacggatacaattacctcgattggtaccttcagaagcctggacaaagcccgcagctgctcatctacttgggatcaaaccgcgcgtcaggagtgcctgaccggttctccggctcgggcagcggtaccgatttcaccctgaaaatctccagggtggaggcagaggacgtgggagtgtattactgtatgcaggcgctgcagactccgtacacatttgggcagggcaccaagctggagatcaagaccactaccccagcaccgaggccacccaccccggctcctaccatcgcctcccagcctctgtccctgcgtccggaggcatgtagacccgcagctggtggggccgtgcatacccggggtcttgacttcgcctgcgatatctacatttgggcccctctggctggtacttgcggggtcctgctgctttcactcgtgatcactctttactgtaagcgcggtcggaagaagctgctgtacatctttaagcaacccttcatgaggcctgtgcagactactcaagaggaggacggctgttcatgccggttcccagaggaggaggaaggcggctgcgaactgcgcgtgaaattcagccgcagcgcagatgctccagcctacaagcaggggcagaaccagctctacaacgaactcaatcttggtcggagagaggagtacgacgtgctggacaagcggagaggacgggacccagaaatgggcgggaagccgcgcagaaagaatccccaagagggcctgtacaacgagctccaaaaggataagatggcagaagcctatagcgagattggtatgaaaggggaacgcagaagaggcaaaggccacgacggactgtaccagggactcagcaccgccaccaaggacacctatgacgctcttcacatgcaggccctgccgcctcgg

SEQ ID NO: 1004 - DNA, 1452 bp, Artificial Sequence
  source: /note="Description of Artificial Sequence: Synthetic polynucleotide"
atggccctccctgtcaccgccctgctgcttccgctggctcttctgctccacgccgctcggcccgaagtccagctcgtggagtccggcggaggccttgtgaagcctggaggttcgctgagactgtcctgcgccgcctccggcttcaccttctccgactactacatgtcctggatcagacaggccccgggaaagggcctggaatgggtgtcctacatctcgtcatcgggcagcactatctactacgcggactcagtgaaggggcggttcaccatttcccgggataacgcgaagaactcgctgtatctgcaaatgaactcactgagggccgaggacaccgccgtgtactactgcgcccgcgatctccgcggggcatttgacatctggggacagggaaccatggtcacagtgtccagcggagggggaggatcgggtggcggaggttccgggggtggaggctcctcctacgtgctgactcagagcccaagcgtcagcgctgcgcccggttacacggcaaccatctcctgtggcggaaacaacattgggaccaagtctgtgcactggtatcagcagaagccgggccaagctcccctgttggtgatccgcgatgactccgtgcggcctagcaaaattccgggacggttctccggctccaacagcggcaatatggccactctcaccatctcgggagtgcaggccggagatgaagccgacttctactgccaagtctgggactcagactccgagcatgtggtgttcgggggcggaaccaagctgactgtgctcaccactaccccagcaccgaggccacccaccccggctcctaccatcgcctcccagcctctgtccctgcgtccggaggcatgtagacccgcagctggtggggccgtgcatacccggggtcttgacttcgcctgcgatatctacatttgggcccctctggctggtacttgcggggtcctgctgctttcactcgtgatcactctttactgtaagcgcggtcggaagaagctgctgtacatctttaagcaacccttcatgaggcctgtgcagactactcaagaggaggacggctgttcatgccggttcccagaggaggaggaaggcggctgcgaactgcgcgtgaaattcagccgcagcgcagatgctccagcctacaagcaggggcagaaccagctctacaacgaactcaatcttggtcggagagaggagtacgacgtgctggacaagcggagaggacgggacccagaaatgggcgggaagccgcgcagaaagaatccccaagagggcctgtacaacgagctccaaaaggataagatggcagaagcctatagcgagattggtatgaaaggggaacgcagaagaggcaaaggccacgacggactgtaccagggactcagcaccgccaccaaggacacctatgacgctcttcacatgcaggccctgccgcctcgg

SEQ ID NO: 1005 - DNA, 1455 bp, Artificial Sequence
  source: /note="Description of Artificial Sequence: Synthetic polynucleotide"
atggccctccctgtcaccgccctgctgcttccgctggctcttctgctccacgccgctcggccccaagtgcagctggtgcagagcggggccgaagtcaagaagccgggagcctccgtgaaagtgtcctgcaagccttcgggatacaccgtgacctcccactacattcattgggtccgccgcgcccccggccaaggactcgagtggatgggcatgatcaaccctagcggcggagtgaccgcgtacagccagacgctgcagggacgcgtgactatgacctcggatacctcctcctccaccgtctatatggaactgtccagcctgcggtccgaggataccgccatgtactactgcgcccgggaaggatcaggctccgggtggtatttcgacttctggggaagaggcaccctcgtgactgtgtcatctgggggagggggttccggtggtggcggatcgggaggaggcggttcatcctacgtgctgacccagccaccctccgtgtccgtgagccccggccagactgcatcgattacatgtagcggcgacggcctctccaagaaatacgtgtcgtggtaccagcagaaggccggacagagcccggtggtgctgatctcaagagataaggagcggcctagcggaatcccggacaggttctcgggttccaactccgcggacactgctactctgaccatctcggggacccaggctatggacgaagccgattactactgccaagcctgggacgacactactgtcgtgtttggagggggcaccaagttgaccgtccttaccactaccccagcaccgaggccacccaccccggctcctaccatcgcctcccagcctctgtccctgcgtccggaggcatgtagacccgcagctggtggggccgtgcatacccggggtcttgacttcgcctgcgatatctacatttgggcccctctggctggtacttgcggggtcctgctgctttcactcgtgatcactctttactgtaagcgcggtcggaagaagctgctgtacatctttaagcaacccttcatgaggcctgtgcagactactcaagaggaggacggctgttcatgccggttcccagaggaggaggaaggcggctgcgaactgcgcgtgaaattcagccgcagcgcagatgctccagcctacaagcaggggcagaaccagctctacaacgaactcaatcttggtcggagagaggagtacgacgtgctggacaagcggagaggacgggacccagaaatgggcgggaagccgcgcagaaagaatccccaagagggcctgtacaacgagctccaaaaggataagatggcagaagcctatagcgagattggtatgaaaggggaacgcagaagaggcaaaggccacgacggactgtaccagggactcagcaccgccaccaaggacacctatgacgctcttcacatgcaggccctgccgcctcgg

SEQ ID NO: 1006 - DNA, 1467 bp, Artificial Sequence
  source: /note="Description of Artificial Sequence: Synthetic polynucleotide"
atggccctccctgtcaccgccctgctgcttccgctggctcttctgctccacgccgctcggccccaagtgcagcttcaggagagcggcccgggactcgtgaagccgtcccagaccctgtccctgacttgcaccgtgtcgggaggaagcatctcgagcggaggctactattggtcgtggattcggcagcaccctggaaagggcctggaatggatcggctacatctactactccggctcgacctactacaacccatcgctgaagtccagagtgacaatctcagtggacacgtccaagaatcagttcagcctgaagctctcttccgtgactgcggccgacaccgccgtgtactactgcgcacgcgctggaattgccgcccggctgaggggtgccttcgacatttggggacagggcaccatggtcaccgtgtcctccggcggcggaggttccgggggtggaggctcaggaggaggggggtccgacatcgtcatgactcagtcgccctcaagcgtcagcgcgtccgtcggggacagagtgatcatcacctgtcgggcgtcccagggaattcgcaactggctggcctggtatcagcagaagcccggaaaggcccccaacctgttgatctacgccgcctcaaacctccaatccggggtgccgagccgcttcagcggctccggttcgggtgccgatttcactctgaccatctcctccctgcaacctgaagatgtggctacctactactgccaaaagtacaactccgcaccttttactttcggaccggggaccaaagtggacattaagaccactaccccagcaccgaggccacccaccccggctcctaccatcgcctcccagcctctgtccctgcgtccggaggcatgtagacccgcagctggtggggccgtgcatacccggggtcttgacttcgcctgcgatatctacatttgggcccctctggctggtacttgcggggtcctgctgctttcactcgtgatcactctttactgtaagcgcggtcggaagaagctgctgtacatctttaagcaacccttcatgaggcctgtgcagactactcaagaggaggacggctgttcatgccggttcccagaggaggaggaaggcggctgcgaactgcgcgtgaaattcagccgcagcgcagatgctccagcctacaagcaggggcagaaccagctctacaacgaactcaatcttggtcggagagaggagtacgacgtgctggacaagcggagaggacgggacccagaaatgggcgggaagccgcgcagaaagaatccccaagagggcctgtacaacgagctccaaaaggataagatggcagaagcctatagcgagattggtatgaaaggggaacgcagaagaggcaaaggccacgacggactgtaccagggactcagcaccgccaccaaggacacctatgacgctcttcacatgcaggccctgccgcctcgg

SEQ ID NO: 1007 - DNA, 1491 bp, Artificial Sequence
  source: /note="Description of Artificial Sequence: Synthetic polynucleotide"
atggccctccctgtcaccgccctgctgcttccgctggctcttctgctccacgccgctcggccccaagtgcagctggtccagtcgggcgccgaggtcaagaagcccgggagctctgtgaaagtgtcctgcaaggcctccgggggcacctttagctcctacgccatctcctgggtccgccaagcaccgggtcaaggcctggagtggatggggggaattatccctatcttcggcactgccaactacgcccagaagttccagggacgcgtgaccattaccgcggacgaatccacctccaccgcttatatggagctgtccagcttgcgctcggaagataccgccgtgtactactgcgcccggaggggtggataccagctgctgagatgggacgtgggcctcctgcggtcggcgttcgacatctggggccagggcactatggtcactgtgtccagcggaggaggcggatcgggaggcggcggatcagggggaggcggttccagctacgtgcttactcaacccccttcggtgtccgtggccccgggacagaccgccagaatcacttgcggaggaaacaacattgggtccaagagcgtgcattggtaccagcagaagccaggacaggcccctgtgctggtgctctacgggaagaacaatcggcccagcggagtgccggacaggttctcgggttcacgctccggtacaaccgcttcactgactatcaccggggcccaggcagaggatgaagcggactactactgttcctcccgggattcatccggcgaccacctccgggtgttcggaaccggaacgaaggtcaccgtgctgaccactaccccagcaccgaggccacccaccccggctcctaccatcgcctcccagcctctgtccctgcgtccggaggcatgtagacccgcagctggtggggccgtgcatacccggggtcttgacttcgcctgcgatatctacatttgggcccctctggctggtacttgcggggtcctgctgctttcactcgtgatcactctttactgtaagcgcggtcggaagaagctgctgtacatctttaagcaacccttcatgaggcctgtgcagactactcaagaggaggacggctgttcatgccggttcccagaggaggaggaaggcggctgcgaactgcgcgtgaaattcagccgcagcgcagatgctccagcctacaagcaggggcagaaccagctctacaacgaactcaatcttggtcggagagaggagtacgacgtgctggacaagcggagaggacgggacccagaaatgggcgggaagccgcgcagaaagaatccccaagagggcctgtacaacgagctccaaaaggataagatggcagaagcctatagcgagattggtatgaaaggggaacgcagaagaggcaaaggccacgacggactgtaccagggactcagcaccgccaccaaggacacctatgacgctcttcacatgcaggccctgccgcctcgg

SEQ ID NO: 1008 - DNA, 1476 bp, Artificial Sequence
  source: /note="Description of Artificial Sequence: Synthetic polynucleotide"
atggccctccctgtcaccgccctgctgcttccgctggctcttctgctccacgccgctcggcccgaagtgcagctccaacagtcaggaccggggctcgtgaagccatcccagaccctgtccctgacttgtgccatctcgggagatagcgtgtcatcgaactccgccgcctggaactggattcggcagagcccgtcccgcggactggagtggcttggaaggacctactaccggtccaagtggtactctttctacgcgatctcgctgaagtcccgcattatcattaaccctgatacctccaagaatcagttctccctccaactgaaatccgtcacccccgaggacacagcagtgtattactgcgcacggagcagccccgaaggactgttcctgtattggtttgacccctggggccaggggactcttgtgaccgtgtcgagcggcggagatgggtccggtggcggtggttcggggggcggcggatcatcatccgaactgacccaggacccggctgtgtccgtggcgctgggacaaaccatccgcattacgtgccagggagactccctgggcaactactacgccacttggtaccagcagaagccgggccaagcccctgtgttggtcatctacgggaccaacaacagaccttccggcatccccgaccggttcagcgcttcgtcctccggcaacactgccagcctgaccatcactggagcgcaggccgaagatgaggccgactactactgcaacagcagagactcctcgggtcatcacctcttgttcggaactggaaccaaggtcaccgtgctgaccactaccccagcaccgaggccacccaccccggctcctaccatcgcctcccagcctctgtccctgcgtccggaggcatgtagacccgcagctggtggggccgtgcatacccggggtcttgacttcgcctgcgatatctacatttgggcccctctggctggtacttgcggggtcctgctgctttcactcgtgatcactctttactgtaagcgcggtcggaagaagctgctgtacatctttaagcaacccttcatgaggcctgtgcagactactcaagaggaggacggctgttcatgccggttcccagaggaggaggaaggcggctgcgaactgcgcgtgaaattcagccgcagcgcagatgctccagcctacaagcaggggcagaaccagctctacaacgaactcaatcttggtcggagagaggagtacgacgtgctggacaagcggagaggacgggacccagaaatgggcgggaagccgcgcagaaagaatccccaagagggcctgtacaacgagctccaaaaggataagatggcagaagcctatagcgagattggtatgaaaggggaacgcagaagaggcaaaggccacgacggactgtaccagggactcagcaccgccaccaaggacacctatgacgctcttcacatgcaggccctgccgcctcgg

SEQ ID NO: 1009 - DNA, 1470 bp, Artificial Sequence
  source: /note="Description of Artificial Sequence: Synthetic polynucleotide"
atggccctccctgtcaccgccctgctgcttccgctggctcttctgctccacgccgctcggcccgaagtgcagctcgtggagtcaggaggcggcctggtccagccgggagggtcccttagactgtcatgcgccgcaagcggattcactttctcctcctatgccatgagctgggtccgccaagcccccggaaagggactggaatgggtgtccgccatctcggggtctggaggctcaacttactacgctgactccgtgaagggacggttcaccattagccgcgacaactccaagaacaccctctacctccaaatgaactccctgcgggccgaggataccgccgtctactactgcgccaaagtggaaggttcaggatcgctggactactggggacagggtactctcgtgaccgtgtcatcgggcggaggaggttccggcggtggcggctccggcggcggagggtcggagatcgtgatgacccagagccctggtactctgagcctttcgccgggagaaagggccaccctgtcctgccgcgcttcccaatccgtgtcctccgcgtacttggcgtggtaccagcagaagccgggacagccccctcggctgctgatcagcggggccagcacccgggcaaccggaatcccagacagattcgggggttccggcagcggcacagatttcaccctgactatttcgaggttggagcccgaggactttgcggtgtattactgtcagcactacgggtcgtcctttaatggctccagcctgttcacgttcggacaggggacccgcctggaaatcaagaccactaccccagcaccgaggccacccaccccggctcctaccatcgcctcccagcctctgtccctgcgtccggaggcatgtagacccgcagctggtggggccgtgcatacccggggtcttgacttcgcctgcgatatctacatttgggcccctctggctggtacttgcggggtcctgctgctttcactcgtgatcactctttactgtaagcgcggtcggaagaagctgctgtacatctttaagcaacccttcatgaggcctgtgcagactactcaagaggaggacggctgttcatgccggttcccagaggaggaggaaggcggctgcgaactgcgcgtgaaattcagccgcagcgcagatgctccagcctacaagcaggggcagaaccagctctacaacgaactcaatcttggtcggagagaggagtacgacgtgctggacaagcggagaggacgggacccagaaatgggcgggaagccgcgcagaaagaatccccaagagggcctgtacaacgagctccaaaaggataagatggcagaagcctatagcgagattggtatgaaaggggaacgcagaagaggcaaaggccacgacggactgtaccagggactcagcaccgccaccaaggacacctatgacgctcttcacatgcaggccctgccgcctcgg

SEQ ID NO: 1010 - DNA, 1455 bp, Artificial Sequence
  source: /note="Description of Artificial Sequence: Synthetic polynucleotide"
atggccctccctgtcaccgccctgctgcttccgctggctcttctgctccacgccgctcggcccgaagtgcaactggtggaaaccggtggcggcctggtgcagcctggaggatcattgaggctgtcatgcgcggccagcggtattaccttctcccggtaccccatgtcctgggtcagacaggccccggggaaagggcttgaatgggtgtccgggatctcggactccggtgtcagcacttactacgccgactccgccaagggacgcttcaccatttcccgggacaactcgaagaacaccctgttcctccaaatgagctccctccgggacgaggatactgcagtgtactactgcgtgacccgcgccgggtccgaggcgtctgacatttggggacagggcactatggtcaccgtgtcgtccggcggagggggctcgggaggcggtggcagcggaggaggagggtccgagatcgtgctgacccaatccccggccaccctctcgctgagccctggagaaagggcaaccttgtcctgtcgcgcgagccagtccgtgagcaactccctggcctggtaccagcagaagcccggacaggctccgagacttctgatctacgacgcttcgagccgggccactggaatccccgaccgcttttcggggtccggctcaggaaccgatttcaccctgacaatctcacggctggagccagaggatttcgccatctattactgccagcagttcggtacttcctccggcctgactttcggaggcggcacgaagctcgaaatcaagaccactaccccagcaccgaggccacccaccccggctcctaccatcgcctcccagcctctgtccctgcgtccggaggcatgtagacccgcagctggtggggccgtgcatacccggggtcttgacttcgcctgcgatatctacatttgggcccctctggctggtacttgcggggtcctgctgctttcactcgtgatcactctttactgtaagcgcggtcggaagaagctgctgtacatctttaagcaacccttcatgaggcctgtgcagactactcaagaggaggacggctgttcatgccggttcccagaggaggaggaaggcggctgcgaactgcgcgtgaaattcagccgcagcgcagatgctccagcctacaagcaggggcagaaccagctctacaacgaactcaatcttggtcggagagaggagtacgacgtgctggacaagcggagaggacgggacccagaaatgggcgggaagccgcgcagaaagaatccccaagagggcctgtacaacgagctccaaaaggataagatggcagaagcctatagcgagattggtatgaaaggggaacgcagaagaggcaaaggccacgacggactgtaccagggactcagcaccgccaccaaggacacctatgacgctcttcacatgcaggccctgccgcctcgg

SEQ ID NO: 1011 - DNA, 1476 bp, Artificial Sequence
  source: /note="Description of Artificial Sequence: Synthetic polynucleotide"
atggccctccctgtcaccgccctgctgcttccgctggctcttctgctccacgccgctcggccccaagtgcagctcgtggaatcgggtggcggactggtgcagccggggggctcacttagactgtcctgcgcggccagcggattcactttctcctcctacgccatgtcctgggtcagacaggcccctggaaagggcctggaatgggtgtccgcaatcagcggcagcggcggctcgacctattacgcggattcagtgaagggcagattcaccatttcccgggacaacgccaagaactccttgtaccttcaaatgaactccctccgcgcggaagataccgcaatctactactgcgctcgggccacttacaagagggaactgcgctactactacgggatggacgtctggggccagggaaccatggtcaccgtgtccagcggaggaggaggatcgggaggaggcggtagcgggggtggagggtcggagatcgtgatgacccagtcccccggcactgtgtcgctgtcccccggcgaacgggccaccctgtcatgtcgggccagccagtcagtgtcgtcaagcttcctcgcctggtaccagcagaaaccgggacaagctccccgcctgctgatctacggagccagcagccgggccaccggtattcctgaccggttctccggttcggggtccgggaccgactttactctgactatctctcgcctcgagccagaggactccgccgtgtattactgccagcagtaccactcctccccgtcctggacgttcggacagggcacaaggctggagattaagaccactaccccagcaccgaggccacccaccccggctcctaccatcgcctcccagcctctgtccctgcgtccggaggcatgtagacccgcagctggtggggccgtgcatacccggggtcttgacttcgcctgcgatatctacatttgggcccctctggctggtacttgcggggtcctgctgctttcactcgtgatcactctttactgtaagcgcggtcggaagaagctgctgtacatctttaagcaacccttcatgaggcctgtgcagactactcaagaggaggacggctgttcatgccggttcccagaggaggaggaaggcggctgcgaactgcgcgtgaaattcagccgcagcgcagatgctccagcctacaagcaggggcagaaccagctctacaacgaactcaatcttggtcggagagaggagtacgacgtgctggacaagcggagaggacgggacccagaaatgggcgggaagccgcgcagaaagaatccccaagagggcctgtacaacgagctccaaaaggataagatggcagaagcctatagcgagattggtatgaaaggggaacgcagaagaggcaaaggccacgacggactgtaccagggactcagcaccgccaccaaggacacctatgacgctcttcacatgcaggccctgccgcctcgg

SEQ ID NO: 1012 - DNA, 1476 bp, Artificial Sequence
  source: /note="Description of Artificial Sequence: Synthetic polynucleotide"
atggccctccctgtcaccgccctgctgcttccgctggctcttctgctccacgccgctcggcccgaggtgcagcttgtggaaaccggtggcggactggtgcagcccggaggaagcctcaggctgtcctgcgccgcgtccggcttcaccttctcctcgtacgccatgtcctgggtccgccaggcccccggaaagggcctggaatgggtgtccgccatctctggaagcggaggttccacgtactacgcggacagcgtcaagggaaggttcacaatctcccgcgataattcgaagaacactctgtaccttcaaatgaacaccctgaaggccgaggacactgctgtgtactactgcgcacgggccacctacaagagagagctccggtactactacggaatggacgtctggggccagggaactactgtgaccgtgtcctcgggagggggtggctccggggggggcggctccggcggaggcggttccgagattgtgctgacccagtcaccttcaactctgtcgctgtccccgggagagagcgctactctgagctgccgggccagccagtccgtgtccaccaccttcctcgcctggtatcagcagaagccggggcaggcaccacggctcttgatctacgggtcaagcaacagagcgaccggaattcctgaccgcttctcggggagcggttcaggcaccgacttcaccctgactatccggcgcctggaacccgaagatttcgccgtgtattactgtcaacagtaccactcctcgccgtcctggacctttggccaaggaaccaaagtggaaatcaagaccactaccccagcaccgaggccacccaccccggctcctaccatcgcctcccagcctctgtccctgcgtccggaggcatgtagacccgcagctggtggggccgtgcatacccggggtcttgacttcgcctgcgatatctacatttgggcccctctggctggtacttgcggggtcctgctgctttcactcgtgatcactctttactgtaagcgcggtcggaagaagctgctgtacatctttaagcaacccttcatgaggcctgtgcagactactcaagaggaggacggctgttcatgccggttcccagaggaggaggaaggcggctgcgaactgcgcgtgaaattcagccgcagcgcagatgctccagcctacaagcaggggcagaaccagctctacaacgaactcaatcttggtcggagagaggagtacgacgtgctggacaagcggagaggacgggacccagaaatgggcgggaagccgcgcagaaagaatccccaagagggcctgtacaacgagctccaaaaggataagatggcagaagcctatagcgagattggtatgaaaggggaacgcagaagaggcaaaggccacgacggactgtaccagggactcagcaccgccaccaaggacacctatgacgctcttcacatgcaggccctgccgcctcgg

SEQ ID NO: 1013 - DNA, 1449 bp, Artificial Sequence
  source: /note="Description of Artificial Sequence: Synthetic polynucleotide"
atggccctccctgtcaccgccctgctgcttccgctggctcttctgctccacgccgctcggcccgaagtgcagctcgtggaaactggaggtggactcgtgcagcctggacggtcgctgcggctgagctgcgctgcatccggcttcaccttcgacgattatgccatgcactgggtcagacaggcgccagggaagggacttgagtgggtgtccggtatcagctggaatagcggctcaatcggatacgcggactccgtgaagggaaggttcaccatttcccgcgacaacgccaagaactccctgtacttgcaaatgaacagcctccgggatgaggacactgccgtgtactactgcgcccgcgtcggaaaagctgtgcccgacgtctggggccagggaaccactgtgaccgtgtccagcggcgggggtggatcgggcggtggagggtccggtggagggggctcagatattgtgatgacccagaccccctcgtccctgtccgcctcggtcggcgaccgcgtgactatcacatgtagagcctcgcagagcatctccagctacctgaactggtatcagcagaagccggggaaggccccgaagctcctgatctacgcggcatcatcactgcaatcgggagtgccgagccggttttccgggtccggctccggcaccgacttcacgctgaccatttcttccctgcaacccgaggacttcgccacttactactgccagcagtcctactccaccccttactccttcggccaaggaaccaggctggaaatcaagaccactaccccagcaccgaggccacccaccccggctcctaccatcgcctcccagcctctgtccctgcgtccggaggcatgtagacccgcagctggtggggccgtgcatacccggggtcttgacttcgcctgcgatatctacatttgggcccctctggctggtacttgcggggtcctgctgctttcactcgtgatcactctttactgtaagcgcggtcggaagaagctgctgtacatctttaagcaacccttcatgaggcctgtgcagactactcaagaggaggacggctgttcatgccggttcccagaggaggaggaaggcggctgcgaactgcgcgtgaaattcagccgcagcgcagatgctccagcctacaagcaggggcagaaccagctctacaacgaactcaatcttggtcggagagaggagtacgacgtgctggacaagcggagaggacgggacccagaaatgggcgggaagccgcgcagaaagaatccccaagagggcctgtacaacgagctccaaaaggataagatggcagaagcctatagcgagattggtatgaaaggggaacgcagaagaggcaaaggccacgacggactgtaccagggactcagcaccgccaccaaggacacctatgacgctcttcacatgcaggccctgccgcctcgg

SEQ ID NO: 1014 - DNA, 1470 bp, Artificial Sequence
  source: /note="Description of Artificial Sequence: Synthetic polynucleotide"
atggccctccctgtcaccgccctgctgcttccgctggctcttctgctccacgccgctcggcccgaagtgcagctcgtggagagcgggggaggattggtgcagcccggaaggtccctgcggctctcctgcactgcgtctggcttcaccttcgacgactacgcgatgcactgggtcagacagcgcccgggaaagggcctggaatgggtcgcctcaatcaactggaagggaaactccctggcctatggcgacagcgtgaagggccgcttcgccatttcgcgcgacaacgccaagaacaccgtgtttctgcaaatgaattccctgcggaccgaggataccgctgtgtactactgcgccagccaccagggcgtggcatactataactacgccatggacgtgtggggaagagggacgctcgtcaccgtgtcctccgggggcggtggatcgggtggaggaggaagcggtggcgggggcagcgaaatcgtgctgactcagagcccgggaactctttcactgtccccgggagaacgggccactctctcgtgccgggccacccagtccatcggctcctccttccttgcctggtaccagcagaggccaggacaggcgccccgcctgctgatctacggtgcttcccaacgcgccactggcattcctgaccggttcagcggcagagggtcgggaaccgatttcacactgaccatttcccgggtggagcccgaagattcggcagtctactactgtcagcattacgagtcctccccttcatggaccttcggtcaagggaccaaagtggagatcaagaccactaccccagcaccgaggccacccaccccggctcctaccatcgcctcccagcctctgtccctgcgtccggaggcatgtagacccgcagctggtggggccgtgcatacccggggtcttgacttcgcctgcgatatctacatttgggcccctctggctggtacttgcggggtcctgctgctttcactcgtgatcactctttactgtaagcgcggtcggaagaagctgctgtacatctttaagcaacccttcatgaggcctgtgcagactactcaagaggaggacggctgttcatgccggttcccagaggaggaggaaggcggctgcgaactgcgcgtgaaattcagccgcagcgcagatgctccagcctacaagcaggggcagaaccagctctacaacgaactcaatcttggtcggagagaggagtacgacgtgctggacaagcggagaggacgggacccagaaatgggcgggaagccgcgcagaaagaatccccaagagggcctgtacaacgagctccaaaaggataagatggcagaagcctatagcgagattggtatgaaaggggaacgcagaagaggcaaaggccacgacggactgtaccagggactcagcaccgccaccaaggacacctatgacgctcttcacatgcaggccctgccgcctcgg

SEQ ID NO: 1015 - DNA, 1455 bp, Artificial Sequence
  source: /note="Description of Artificial Sequence: Synthetic polynucleotide"
atggccctccctgtcaccgccctgctgcttccgctggctcttctgctccacgccgctcggcccgaggtgcagttggtcgaaagcgggggcgggcttgtgcagcctggcggatcactgcggctgtcctgcgcggcatcaggcttcacgttttcttcctacgccatgtcctgggtgcgccaggcccctggaaagggactggaatgggtgtccgcgatttcggggtccggcgggagcacctactacgccgattccgtgaagggccgcttcactatctcgcgggacaactccaagaacaccctctacctccaaatgaatagcctgcgggccgaggataccgccgtctactattgcgctaaggtcgtgcgcgacggaatggacgtgtggggacagggtaccaccgtgacagtgtcctcggggggaggcggtagcggcggaggaggaagcggtggtggaggttccgagattgtgctgactcaatcacccgcgaccctgagcctgtcccccggcgaaagggccactctgtcctgtcgggccagccaatcagtctcctcctcgtacctggcctggtaccagcagaagccaggacaggctccgagactccttatctatggcgcatcctcccgcgccaccggaatcccggataggttctcgggaaacggatcggggaccgacttcactctcaccatctcccggctggaaccggaggacttcgccgtgtactactgccagcagtacggcagcccgcctagattcactttcggccccggcaccaaagtggacatcaagaccactaccccagcaccgaggccacccaccccggctcctaccatcgcctcccagcctctgtccctgcgtccggaggcatgtagacccgcagctggtggggccgtgcatacccggggtcttgacttcgcctgcgatatctacatttgggcccctctggctggtacttgcggggtcctgctgctttcactcgtgatcactctttactgtaagcgcggtcggaagaagctgctgtacatctttaagcaacccttcatgaggcctgtgcagactactcaagaggaggacggctgttcatgccggttcccagaggaggaggaaggcggctgcgaactgcgcgtgaaattcagccgcagcgcagatgctccagcctacaagcaggggcagaaccagctctacaacgaactcaatcttggtcggagagaggagtacgacgtgctggacaagcggagaggacgggacccagaaatgggcgggaagccgcgcagaaagaatccccaagagggcctgtacaacgagctccaaaaggataagatggcagaagcctatagcgagattggtatgaaaggggaacgcagaagaggcaaaggccacgacggactgtaccagggactcagcaccgccaccaaggacacctatgacgctcttcacatgcaggccctgccgcctcgg

SEQ ID NO: 1016 - DNA, 1458 bp, Artificial Sequence
  source: /note="Description of Artificial Sequence: Synthetic polynucleotide"
atggccctccctgtcaccgccctgctgcttccgctggctcttctgctccacgccgctcggcccgaagtgcagctgctggagtccggcggtggattggtgcaaccggggggatcgctcagactgtcctgtgcggcgtcaggcttcaccttctcgagctacgccatgtcatgggtcagacaggcccctggaaagggtctggaatgggtgtccgccatttccgggagcgggggatctacatactacgccgatagcgtgaagggccgcttcaccatttcccgggacaactccaagaacactctctatctgcaaatgaactccctccgcgctgaggacactgccgtgtactactgcgccaaaatccctcagaccggcaccttcgactactggggacaggggactctggtcaccgtcagcagcggtggcggaggttcggggggaggaggaagcggcggcggagggtccgagattgtgctgacccagtcacccggcactttgtccctgtcgcctggagaaagggccaccctttcctgccgggcatcccaatccgtgtcctcctcgtacctggcctggtaccagcagaggcccggacaggccccacggcttctgatctacggagcaagcagccgcgcgaccggtatcccggaccggttttcgggctcgggctcaggaactgacttcaccctcaccatctcccgcctggaacccgaagatttcgctgtgtattactgccagcactacggcagctccccgtcctggacgttcggccagggaactcggctggagatcaagaccactaccccagcaccgaggccacccaccccggctcctaccatcgcctcccagcctctgtccctgcgtccggaggcatgtagacccgcagctggtggggccgtgcatacccggggtcttgacttcgcctgcgatatctacatttgggcccctctggctggtacttgcggggtcctgctgctttcactcgtgatcactctttactgtaagcgcggtcggaagaagctgctgtacatctttaagcaacccttcatgaggcctgtgcagactactcaagaggaggacggctgttcatgccggttcccagaggaggaggaaggcggctgcgaactgcgcgtgaaattcagccgcagcgcagatgctccagcctacaagcaggggcagaaccagctctacaacgaactcaatcttggtcggagagaggagtacgacgtgctggacaagcggagaggacgggacccagaaatgggcgggaagccgcgcagaaagaatccccaagagggcctgtacaacgagctccaaaaggataagatggcagaagcctatagcgagattggtatgaaaggggaacgcagaagaggcaaaggccacgacggactgtaccagggactcagcaccgccaccaaggacacctatgacgctcttcacatgcaggccctgccgcctcgg

SEQ ID NO: 1017 - DNA, 1476 bp, Artificial Sequence
  source: /note="Description of Artificial Sequence: Synthetic polynucleotide"
atggccctccctgtcaccgccctgctgcttccgctggctcttctgctccacgccgctcggcccgaagtgcaactggtggaaaccggtggaggactcgtgcagcctggcggcagcctccggctgagctgcgccgcttcgggattcaccttttcctcctacgcgatgtcttgggtcagacaggcccccggaaaggggctggaatgggtgtcagccatctccggctccggcggatcaacgtactacgccgactccgtgaaaggccggttcaccatgtcgcgcgagaatgacaagaactccgtgttcctgcaaatgaactccctgagggtggaggacaccggagtgtactattgtgcgcgcgccaactacaagagagagctgcggtactactacggaatggacgtctggggacagggaactatggtgaccgtgtcatccggtggagggggaagcggcggtggaggcagcgggggcgggggttcagaaattgtcatgacccagtccccgggaactctttccctctcccccggggaatccgcgactttgtcctgccgggccagccagcgcgtggcctcgaactacctcgcatggtaccagcataagccaggccaagccccttccctgctgatttccggggctagcagccgcgccactggcgtgccggataggttctcgggaagcggctcgggtaccgatttcaccctggcaatctcgcggctggaaccggaggattcggccgtgtactactgccagcactatgactcatccccctcctggacattcggacagggcaccaaggtcgagatcaagaccactaccccagcaccgaggccacccaccccggctcctaccatcgcctcccagcctctgtccctgcgtccggaggcatgtagacccgcagctggtggggccgtgcatacccggggtcttgacttcgcctgcgatatctacatttgggcccctctggctggtacttgcggggtcctgctgctttcactcgtgatcactctttactgtaagcgcggtcggaagaagctgctgtacatctttaagcaacccttcatgaggcctgtgcagactactcaagaggaggacggctgttcatgccggttcccagaggaggaggaaggcggctgcgaactgcgcgtgaaattcagccgcagcgcagatgctccagcctacaagcaggggcagaaccagctctacaacgaactcaatcttggtcggagagaggagtacgacgtgctggacaagcggagaggacgggacccagaaatgggcgggaagccgcgcagaaagaatccccaagagggcctgtacaacgagctccaaaaggataagatggcagaagcctatagcgagattggtatgaaaggggaacgcagaagaggcaaaggccacgacggactgtaccagggactcagcaccgccaccaaggacacctatgacgctcttcacatgcaggccctgccgcctcgg

SEQ ID NO: 1018 - DNA, 1464 bp, Artificial Sequence
  source: /note="Description of Artificial Sequence: Synthetic polynucleotide"
atggccctccctgtcaccgccctgctgcttccgctggctcttctgctccacgccgctcggcccgaagtgcagctgctcgaaaccggtggagggctggtgcagccagggggctccctgaggctttcatgcgccgctagcggattctccttctcctcttacgccatgtcgtgggtccgccaagcccctggaaaaggcctggaatgggtgtccgcgatttccgggagcggaggttcgacctattacgccgactccgtgaagggccgctttaccatctcccgggataactccaagaacactctgtacctccaaatgaactcgctgagagccgaggacaccgccgtgtattactgcgcgaaggcgctggtcggcgcgactggggcattcgacatctggggacagggaactcttgtgaccgtgtcgagcggaggcggcggctccggcggaggagggagcgggggcggtggttccgaaatcgtgttgactcagtccccgggaaccctgagcttgtcacccggggagcgggccactctctcctgtcgcgcctcccaatcgctctcatccaatttcctggcctggtaccagcagaagcccggacaggccccgggcctgctcatctacggcgcttcaaactgggcaacgggaacccctgatcggttcagcggaagcggatcgggtactgactttaccctgaccatcaccagactggaaccggaggacttcgccgtgtactactgccagtactacggcacctcccccatgtacacattcggacagggtaccaaggtcgagattaagaccactaccccagcaccgaggccacccaccccggctcctaccatcgcctcccagcctctgtccctgcgtccggaggcatgtagacccgcagctggtggggccgtgcatacccggggtcttgacttcgcctgcgatatctacatttgggcccctctggctggtacttgcggggtcctgctgctttcactcgtgatcactctttactgtaagcgcggtcggaagaagctgctgtacatctttaagcaacccttcatgaggcctgtgcagactactcaagaggaggacggctgttcatgccggttcccagaggaggaggaaggcggctgcgaactgcgcgtgaaattcagccgcagcgcagatgctccagcctacaagcaggggcagaaccagctctacaacgaactcaatcttggtcggagagaggagtacgacgtgctggacaagcggagaggacgggacccagaaatgggcgggaagccgcgcagaaagaatccccaagagggcctgtacaacgagctccaaaaggataagatggcagaagcctatagcgagattggtatgaaaggggaacgcagaagaggcaaaggccacgacggactgtaccagggactcagcaccgccaccaaggacacctatgacgctcttcacatgcaggccctgccgcctcgg

SEQ ID NO: 1019 - DNA, 1464 bp, Artificial Sequence
  source: /note="Description of Artificial Sequence: Synthetic polynucleotide"
atggccctccctgtcaccgccctgctgcttccgctggctcttctgctccacgccgctcggcccgaagtgcagctgcttgagagcggtggaggtctggtgcagcccgggggatcactgcgcctgtcctgtgccgcgtccggtttcactttctcctcgtacgccatgtcgtgggtcagacaggcaccgggaaagggactggaatgggtgtcagccatttcgggttcggggggcagcacctactacgctgactccgtgaagggccggttcaccatttcccgcgacaactccaagaacaccttgtacctccaaatgaactccctgcgggccgaagataccgccgtgtattactgcgtgctgtggttcggagagggattcgacccgtggggacaaggaacactcgtgactgtgtcatccggcggaggcggcagcggtggcggcggttccggcggcggcggatctgacatcgtgttgacccagtcccctctgagcctgccggtcactcctggcgaaccagccagcatctcctgccggtcgagccagtccctcctgcactccaatgggtacaactacctcgattggtatctgcaaaagccgggccagagcccccagctgctgatctaccttgggtcaaaccgcgcttccggggtgcctgatagattctccgggtccgggagcggaaccgactttaccctgaaaatctcgagggtggaggccgaggacgtcggagtgtactactgcatgcaggcgctccagactcccctgaccttcggaggaggaacgaaggtcgacatcaagaccactaccccagcaccgaggccacccaccccggctcctaccatcgcctcccagcctctgtccctgcgtccggaggcatgtagacccgcagctggtggggccgtgcatacccggggtcttgacttcgcctgcgatatctacatttgggcccctctggctggtacttgcggggtcctgctgctttcactcgtgatcactctttactgtaagcgcggtcggaagaagctgctgtacatctttaagcaacccttcatgaggcctgtgcagactactcaagaggaggacggctgttcatgccggttcccagaggaggaggaaggcggctgcgaactgcgcgtgaaattcagccgcagcgcagatgctccagcctacaagcaggggcagaaccagctctacaacgaactcaatcttggtcggagagaggagtacgacgtgctggacaagcggagaggacgggacccagaaatgggcgggaagccgcgcagaaagaatccccaagagggcctgtacaacgagctccaaaaggataagatggcagaagcctatagcgagattggtatgaaaggggaacgcagaagaggcaaaggccacgacggactgtaccagggactcagcaccgccaccaaggacacctatgacgctcttcacatgcaggccctgccgcctcgg

SEQ ID NO: 1020 - DNA, 1485 bp, Artificial Sequence
  source: /note="Description of Artificial Sequence: Synthetic polynucleotide"
atggccctccctgtcaccgccctgctgcttccgctggctcttctgctccacgccgctcggccccaagtgcagctcgtggagtcaggcggaggactggtgcagcccgggggctccctgagactttcctgcgcggcatcgggttttaccttctcctcctatgctatgtcctgggtgcgccaggccccgggaaagggactggaatgggtgtccgcaatcagcggtagcgggggctcaacatactacgccgactccgtcaagggtcgcttcactatttcccgggacaactccaagaataccctgtacctccaaatgaacagcctcagggccgaggatactgccgtgtactactgcgccaaagtcggatacgatagctccggttactaccgggactactacggaatggacgtgtggggacagggcaccaccgtgaccgtgtcaagcggcggaggcggttcaggagggggaggctccggcggtggagggtccgaaatcgtcctgactcagtcgcctggcactctgtcgttgtccccgggggagcgcgctaccctgtcgtgtcgggcgtcgcagtccgtgtcgagctcctacctcgcgtggtaccagcagaagcccggacaggcccctagacttctgatctacggcacttcttcacgcgccaccgggatcagcgacaggttcagcggctccggctccgggaccgacttcaccctgaccattagccggctggagcctgaagatttcgccgtgtattactgccaacactacggaaactcgccgccaaagttcacgttcggacccggaaccaagctggaaatcaagaccactaccccagcaccgaggccacccaccccggctcctaccatcgcctcccagcctctgtccctgcgtccggaggcatgtagacccgcagctggtggggccgtgcatacccggggtcttgacttcgcctgcgatatctacatttgggcccctctggctggtacttgcggggtcctgctgctttcactcgtgatcactctttactgtaagcgcggtcggaagaagctgctgtacatctttaagcaacccttcatgaggcctgtgcagactactcaagaggaggacggctgttcatgccggttcccagaggaggaggaaggcggctgcgaactgcgcgtgaaattcagccgcagcgcagatgctccagcctacaagcaggggcagaaccagctctacaacgaactcaatcttggtcggagagaggagtacgacgtgctggacaagcggagaggacgggacccagaaatgggcgggaagccgcgcagaaagaatccccaagagggcctgtacaacgagctccaaaaggataagatggcagaagcctatagcgagattggtatgaaaggggaacgcagaagaggcaaaggccacgacggactgtaccagggactcagcaccgccaccaaggacacctatgacgctcttcacatgcaggccctgccgcctcgg

SEQ ID NO: 1021 - DNA, 1470 bp, Artificial Sequence
  source: /note="Description of Artificial Sequence: Synthetic polynucleotide"
atggccctccctgtcaccgccctgctgcttccgctggctcttctgctccacgccgctcggcccgaagtccaactggtggagtccgggggagggctcgtgcagcccggaggcagccttcggctgtcgtgcgccgcctccgggttcacgttctcatcctacgcgatgtcgtgggtcagacaggcaccaggaaagggactggaatgggtgtccgccattagcggctccggcggtagcacctactatgccgactcagtgaagggaaggttcactatctcccgcgacaacagcaagaacaccctgtacctccaaatgaactctctgcgggccgaggataccgcggtgtactattgcgccaagatgggttggtccagcggatacttgggagccttcgacatttggggacagggcactactgtgaccgtgtcctccgggggtggcggatcgggaggcggcggctcgggtggagggggttccgaaatcgtgttgacccagtcaccgggaaccctctcgctgtccccgggagaacgggctacactgtcatgtagagcgtcccagtccgtggcttcctcgttcctggcctggtaccagcagaagccgggacaggcaccccgcctgctcatctacggagccagcggccgggcgaccggcatccctgaccgcttctccggttccggctcgggcaccgactttactctgaccattagcaggcttgagcccgaggattttgccgtgtactactgccaacactacggggggagccctcgcctgaccttcggaggcggaactaaggtcgatatcaaaaccactaccccagcaccgaggccacccaccccggctcctaccatcgcctcccagcctctgtccctgcgtccggaggcatgtagacccgcagctggtggggccgtgcatacccggggtcttgacttcgcctgcgatatctacatttgggcccctctggctggtacttgcggggtcctgctgctttcactcgtgatcactctttactgtaagcgcggtcggaagaagctgctgtacatctttaagcaacccttcatgaggcctgtgcagactactcaagaggaggacggctgttcatgccggttcccagaggaggaggaaggcggctgcgaactgcgcgtgaaattcagccgcagcgcagatgctccagcctacaagcaggggcagaaccagctctacaacgaactcaatcttggtcggagagaggagtacgacgtgctggacaagcggagaggacgggacccagaaatgggcgggaagccgcgcagaaagaatccccaagagggcctgtacaacgagctccaaaaggataagatggcagaagcctatagcgagattggtatgaaaggggaacgcagaagaggcaaaggccacgacggactgtaccagggactcagcaccgccaccaaggacacctatgacgctcttcacatgcaggccctgccgcctcgg

SEQ ID NO: 1022-1041 - skipped (20 entries)

SEQ ID NO: 1042 - DNA, 1470 bp, Artificial Sequence
  source: /note="Description of Artificial Sequence: Synthetic polynucleotide"
atggccctccctgtcaccgccctgctgcttccgctggctcttctgctccacgccgctcggcccgagatccagctggtgcagtcgggagctgaagtcaaaaagcctggcgcaaccgtcaagatctcgtgcaaaggatcagggttcaacatcgaggactactacatccattgggtgcaacaggcacccggaaaaggcctggagtggatggggaggattgacccagaaaatgacgaaaccaagtacggaccgatcttccaaggacgggtgaccatcacggctgacacttccactaacaccgtctacatggaactctcgagccttcgctcggaagataccgcggtgtactactgcgcctttagaggtggagtctactggggacaagggactaccgtcaccgtgtcgtcaggtggcggaggatcaggcggaggcggctccggtggaggaggaagcggaggaggtggctccgacgtggtgatgacgcagtcaccggactccttggcggtgagcctgggtgaacgcgccactatcaactgcaagagctcccagagcttgctggactccgatggaaagacttatctcaattggctgcaacagaagcctggccagccgccaaagagactcatctcactggtgagcaagctggatagcggagtgccagatcggttttcgggatcgggctcaggcaccgacttcaccctgactatttcctccctccaagccgaggatgtggccgtctactactgttggcaggggactcacttcccggggaccttcggtggaggcactaaggtggagatcaaaaccactaccccagcaccgaggccacccaccccggctcctaccatcgcctcccagcctctgtccctgcgtccggaggcatgtagacccgcagctggtggggccgtgcatacccggggtcttgacttcgcctgcgatatctacatttgggcccctctggctggtacttgcggggtcctgctgctttcactcgtgatcactctttactgtaagcgcggtcggaagaagctgctgtacatctttaagcaacccttcatgaggcctgtgcagactactcaagaggaggacggctgttcatgccggttcccagaggaggaggaaggcggctgcgaactgcgcgtgaaattcagccgcagcgcagatgctccagcctacaagcaggggcagaaccagctctacaacgaactcaatcttggtcggagagaggagtacgacgtgctggacaagcggagaggacgggacccagaaatgggcgggaagccgcgcagaaagaatccccaagagggcctgtacaacgagctccaaaaggataagatggcagaagcctatagcgagattggtatgaaaggggaacgcagaagaggcaaaggccacgacggactgtaccagggactcagcaccgccaccaaggacacctatgacgctcttcacatgcaggccctgccgcctcgg

SEQ ID NO: 1043 - protein, 490 aa, Artificial Sequence
  source: /note="Description of Artificial Sequence: Synthetic polypeptide"
MALPVTALLLPLALLLHAARPEIQLVQSGAEVKKPGATVKISCKGSGFNIEDYYIHWVQQAPGKGLEWMGRIDPENDETKYGPIFQGRVTITADTSTNTVYMELSSLRSEDTAVYYCAFRGGVYWGQGTTVTVSSGGGGSGGGGSGGGGSGGGGSDVVMTQSPDSLAVSLGERATINCKSSQSLLDSDGKTYLNWLQQKPGQPPKRLISLVSKLDSGVPDRFSGSGSGTDFTLTISSLQAEDVAVYYCWQGTHFPGTFGGGTKVEIKTTTPAPRPPTPAPTIASQPLSLRPEACRPAAGGAVHTRGLDFACDIYIWAPLAGTCGVLLLSLVITLYCKRGRKKLLYIFKQPFMRPVQTTQEEDGCSCRFPEEEEGGCELRVKFSRSADAPAYKQGQNQLYNELNLGRREEYDVLDKRRGRDPEMGGKPRRKNPQEGLYNELQKDKMAEAYSEIGMKGERRRGKGHDGLYQGLSTATKDTYDALHMQALPPR

SEQ ID NO: 1044-1047 - skipped (4 entries)

SEQ ID NO: 1048 - DNA, 1470 bp, Artificial Sequence
  source: /note="Description of Artificial Sequence: Synthetic polynucleotide"
atggccctccctgtcaccgccctgctgcttccgctggctcttctgctccacgccgctcggcccgacgtggtcatgactcaaagcccagattccttggctgtctcccttggagaaagagcaacgatcaattgcaaaagctcgcagtccctgttggactccgatggaaaaacctacctcaactggctgcagcagaagccgggacaaccaccaaagcggctgatttccctcgtgtccaagctggacagcggcgtgccggatcgcttctcgggcagcggctcgggaaccgattttactctcactatttcgtcactgcaagcggaggacgtggcggtgtattactgctggcagggcactcacttcccgggtacttttggtggaggtaccaaagtcgaaatcaagggtggaggcgggagcggaggaggcgggtcgggaggaggaggatcgggtggcggaggctcagaaatccagctggtgcagtcaggtgccgaagtgaagaagcctggggccacggtgaagatctcgtgcaaggggagcggattcaacatcgaggattactacatccattgggtgcaacaggcccctggcaaagggctggaatggatgggaaggatcgaccccgagaatgacgagactaagtacggcccgatcttccaaggacgggtgaccatcactgcagacacttcaaccaacaccgtctacatggaactctcctcgctgcgctccgaggacaccgccgtgtactactgtgctttcagaggaggagtctactggggacagggaacgaccgtgaccgtcagctcaaccactaccccagcaccgaggccacccaccccggctcctaccatcgcctcccagcctctgtccctgcgtccggaggcatgtagacccgcagctggtggggccgtgcatacccggggtcttgacttcgcctgcgatatctacatttgggcccctctggctggtacttgcggggtcctgctgctttcactcgtgatcactctttactgtaagcgcggtcggaagaagctgctgtacatctttaagcaacccttcatgaggcctgtgcagactactcaagaggaggacggctgttcatgccggttcccagaggaggaggaaggcggctgcgaactgcgcgtgaaattcagccgcagcgcagatgctccagcctacaagcaggggcagaaccagctctacaacgaactcaatcttggtcggagagaggagtacgacgtgctggacaagcggagaggacgggacccagaaatgggcgggaagccgcgcagaaagaatccccaagagggcctgtacaacgagctccaaaaggataagatggcagaagcctatagcgagattggtatgaaaggggaacgcagaagaggcaaaggccacgacggactgtaccagggactcagcaccgccaccaaggacacctatgacgctcttcacatgcaggccctgccgcctcgg

SEQ ID NO: 1049 - protein, 490 aa, Artificial Sequence
  source: /note="Description of Artificial Sequence: Synthetic polypeptide"
MALPVTALLLPLALLLHAARPDVVMTQSPDSLAVSLGERATINCKSSQSLLDSDGKTYLNWLQQKPGQPPKRLISLVSKLDSGVPDRFSGSGSGTDFTLTISSLQAEDVAVYYCWQGTHFPGTFGGGTKVEIKGGGGSGGGGSGGGGSGGGGSEIQLVQSGAEVKKPGATVKISCKGSGFNIEDYYIHWVQQAPGKGLEWMGRIDPENDETKYGPIFQGRVTITADTSTNTVYMELSSLRSEDTAVYYCAFRGGVYWGQGTTVTVSSTTTPAPRPPTPAPTIASQPLSLRPEACRPAAGGAVHTRGLDFACDIYIWAPLAGTCGVLLLSLVITLYCKRGRKKLLYIFKQPFMRPVQTTQEEDGCSCRFPEEEEGGCELRVKFSRSADAPAYKQGQNQLYNELNLGRREEYDVLDKRRGRDPEMGGKPRRKNPQEGLYNELQKDKMAEAYSEIGMKGERRRGKGHDGLYQGLSTATKDTYDALHMQALPPR

SEQ ID NO: 1050-1053 - skipped (4 entries)

SEQ ID NO: 1054 - DNA, 1470 bp, Artificial Sequence
  source: /note="Description of Artificial Sequence: Synthetic polynucleotide"
atggccctccctgtcaccgccctgctgcttccgctggctcttctgctccacgccgctcggcccgaaatccagctggtgcaaagcggagccgaggtgaagaagcccggagaatccctgcgcatctcgtgtaagggttccggctttaacatcgaggattactacatccactgggtgagacagatgccgggcaaaggtctggaatggatgggccgcatcgacccggagaacgacgaaaccaaatacggaccaatcttccaaggacatgtgactatttccgcggatacctccatcaacactgtctacttgcagtggagctcgctcaaggcgtcggataccgccatgtactactgcgcattcagaggaggtgtgtactggggccagggcactacggtcaccgtgtcctcgggaggtggagggtcaggaggcggaggctcgggcggtggaggatcaggcggaggaggaagcgatgtggtcatgactcaatccccactgtcactgcctgtcactctggggcaaccggcttccatctcatgcaagtcaagccaatcgctgctcgactccgacggaaaaacctacctcaattggcttcagcagcgcccaggccagtcgcctcggaggctgatctcactcgtgtcgaagcttgactccggggtgccggatcggtttagcggaagcggatcggggaccgacttcacgttgaagattagccgggtggaagccgaggacgtgggagtctattactgctggcaggggacccacttcccggggactttcggaggaggcaccaaagtcgagattaagaccactaccccagcaccgaggccacccaccccggctcctaccatcgcctcccagcctctgtccctgcgtccggaggcatgtagacccgcagctggtggggccgtgcatacccggggtcttgacttcgcctgcgatatctacatttgggcccctctggctggtacttgcggggtcctgctgctttcactcgtgatcactctttactgtaagcgcggtcggaagaagctgctgtacatctttaagcaacccttcatgaggcctgtgcagactactcaagaggaggacggctgttcatgccggttcccagaggaggaggaaggcggctgcgaactgcgcgtgaaattcagccgcagcgcagatgctccagcctacaagcaggggcagaaccagctctacaacgaactcaatcttggtcggagagaggagtacgacgtgctggacaagcggagaggacgggacccagaaatgggcgggaagccgcgcagaaagaatccccaagagggcctgtacaacgagctccaaaaggataagatggcagaagcctatagcgagattggtatgaaaggggaacgcagaagaggcaaaggccacgacggactgtaccagggactcagcaccgccaccaaggacacctatgacgctcttcacatgcaggccctgccgcctcgg

SEQ ID NO: 1055 - protein, 490 aa, Artificial Sequence
  source: /note="Description of Artificial Sequence: Synthetic polypeptide"
MALPVTALLLPLALLLHAARPEIQLVQSGAEVKKPGESLRISCKGSGFNIEDYYIHWVRQMPGKGLEWMGRIDPENDETKYGPIFQGHVTISADTSINTVYLQWSSLKASDTAMYYCAFRGGVYWGQGTTVTVSSGGGGSGGGGSGGGGSGGGGSDVVMTQSPLSLPVTLGQPASISCKSSQSLLDSDGKTYLNWLQQRPGQSPRRLISLVSKLDSGVPDRFSGSGSGTDFTLKISRVEAEDVGVYYCWQGTHFPGTFGGGTKVEIKTTTPAPRPPTPAPTIASQPLSLRPEACRPAAGGAVHTRGLDFACDIYIWAPLAGTCGVLLLSLVITLYCKRGRKKLLYIFKQPFMRPVQTTQEEDGCSCRFPEEEEGGCELRVKFSRSADAPAYKQGQNQLYNELNLGRREEYDVLDKRRGRDPEMGGKPRRKNPQEGLYNELQKDKMAEAYSEIGMKGERRRGKGHDGLYQGLSTATKDTYDALHMQALPPR

SEQ ID NO: 1056-1059 - skipped (4 entries)

SEQ ID NO: 1060 - DNA, 1470 bp, Artificial Sequence
  source: /note="Description of Artificial Sequence: Synthetic polynucleotide"
atggccctccctgtcaccgccctgctgcttccgctggctcttctgctccacgccgctcggcccgacgtcgtcatgacccaatcccctctctccctgccggtcaccctgggtcagccggcgtcgatctcatgcaaaagctcacagtccctgctggattcggacggaaaaacctacttgaactggctccaacagaggccgggtcagtcccctcgcagactgatctcgctggtgagcaagctcgactcgggtgtgccggatcggttctccgggtcaggatcgggcaccgactttacgctcaagatttcgagagtggaggccgaggatgtgggagtgtactattgctggcagggcacgcatttccccgggacctttggaggcgggactaaggtggaaatcaagggaggtggcggatcaggcggaggaggcagcggcggaggtggatcaggaggcggagggtcagagatccagctggtccaaagcggagcagaggtgaagaagccaggcgagtcccttcgcatttcgtgcaaagggagcggcttcaacattgaagattactacatccactgggtgcggcaaatgccaggaaagggtctggaatggatgggacggatcgacccagaaaatgatgaaactaagtacggaccgatcttccaaggacacgtcactatctccgcggacacttcgatcaacaccgtgtacctccagtggagcagcttgaaagcctccgacaccgctatgtactactgtgccttccgcggaggagtctactggggacaggggactactgtgaccgtgtcgtccaccactaccccagcaccgaggccacccaccccggctcctaccatcgcctcccagcctctgtccctgcgtccggaggcatgtagacccgcagctggtggggccgtgcatacccggggtcttgacttcgcctgcgatatctacatttgggcccctctggctggtacttgcggggtcctgctgctttcactcgtgatcactctttactgtaagcgcggtcggaagaagctgctgtacatctttaagcaacccttcatgaggcctgtgcagactactcaagaggaggacggctgttcatgccggttcccagaggaggaggaaggcggctgcgaactgcgcgtgaaattcagccgcagcgcagatgctccagcctacaagcaggggcagaaccagctctacaacgaactcaatcttggtcggagagaggagtacgacgtgctggacaagcggagaggacgggacccagaaatgggcgggaagccgcgcagaaagaatccccaagagggcctgtacaacgagctccaaaaggataagatggcagaagcctatagcgagattggtatgaaaggggaacgcagaagaggcaaaggccacgacggactgtaccagggactcagcaccgccaccaaggacacctatgacgctcttcacatgcaggccctgccgcctcgg

SEQ ID NO: 1061 - protein, 490 aa, Artificial Sequence
  source: /note="Description of Artificial Sequence: Synthetic polypeptide"
MALPVTALLLPLALLLHAARPDVVMTQSPLSLPVTLGQPASISCKSSQSLLDSDGKTYLNWLQQRPGQSPRRLISLVSKLDSGVPDRFSGSGSGTDFTLKISRVEAEDVGVYYCWQGTHFPGTFGGGTKVEIKGGGGSGGGGSGGGGSGGGGSEIQLVQSGAEVKKPGESLRISCKGSGFNIEDYYIHWVRQMPGKGLEWMGRIDPENDETKYGPIFQGHVTISADTSINTVYLQWSSLKASDTAMYYCAFRGGVYWGQGTTVTVSSTTTPAPRPPTPAPTIASQPLSLRPEACRPAAGGAVHTRGLDFACDIYIWAPLAGTCGVLLLSLVITLYCKRGRKKLLYIFKQPFMRPVQTTQEEDGCSCRFPEEEEGGCELRVKFSRSADAPAYKQGQNQLYNELNLGRREEYDVLDKRRGRDPEMGGKPRRKNPQEGLYNELQKDKMAEAYSEIGMKGERRRGKGHDGLYQGLSTATKDTYDALHMQALPPR

SEQ ID NO: 1062-1065 - skipped (4 entries)

SEQ ID NO: 1066 - DNA, 1470 bp, Artificial Sequence
  source: /note="Description of Artificial Sequence: Synthetic polynucleotide"
atggccctccctgtcaccgccctgctgcttccgctggctcttctgctccacgccgctcggcccgaaatccagctcgtgcagagcggagccgaggtcaagaaaccgggtgctaccgtgaagatttcatgcaagggatcgggcttcaacatcgaggattactacatccactgggtgcagcaggcaccaggaaaaggacttgaatggatgggccggatcgacccggaaaatgacgagactaagtacggccctatcttccaaggacgggtgacgatcaccgcagacactagcaccaacaccgtctatatggaactctcgtccctgaggtccgaagatactgccgtgtactactgtgcgtttcgcggaggtgtgtactggggacagggtaccaccgtcaccgtgtcatcgggcggtggaggctccggtggaggagggtcaggaggcggtggaagcggaggaggcggcagcgacgtggtcatgactcaatcgccgctgtcgctgcccgtcactctgggacaacccgcgtccatcagctgcaaatcctcgcagtcactgcttgactccgatggaaagacctacctcaactggctgcagcaacgcccaggccaatccccaagacgcctgatctcgttggtgtcaaagctggactcaggggtgccggaccggttctccgggagcgggtcgggcacggatttcactctcaagatctccagagtggaagccgaggatgtgggagtctactactgctggcagggaacccatttccctggaacttttggcggaggaactaaggtcgagattaaaaccactaccccagcaccgaggccacccaccccggctcctaccatcgcctcccagcctctgtccctgcgtccggaggcatgtagacccgcagctggtggggccgtgcatacccggggtcttgacttcgcctgcgatatctacatttgggcccctctggctggtacttgcggggtcctgctgctttcactcgtgatcactctttactgtaagcgcggtcggaagaagctgctgtacatctttaagcaacccttcatgaggcctgtgcagactactcaagaggaggacggctgttcatgccggttcccagaggaggaggaaggcggctgcgaactgcgcgtgaaattcagccgcagcgcagatgctccagcctacaagcaggggcagaaccagctctacaacgaactcaatcttggtcggagagaggagtacgacgtgctggacaagcggagaggacgggacccagaaatgggcgggaagccgcgcagaaagaatccccaagagggcctgtacaacgagctccaaaaggataagatggcagaagcctatagcgagattggtatgaaaggggaacgcagaagaggcaaaggccacgacggactgtaccagggactcagcaccgccaccaaggacacctatgacgctcttcacatgcaggccctgccgcctcgg

SEQ ID NO: 1067 - protein, 490 aa, Artificial Sequence
  source: /note="Description of Artificial Sequence: Synthetic polypeptide"
MALPVTALLLPLALLLHAARPEIQLVQSGAEVKKPGATVKISCKGSGFNIEDYYIHWVQQAPGKGLEWMGRIDPENDETKYGPIFQGRVTITADTSTNTVYMELSSLRSEDTAVYYCAFRGGVYWGQGTTVTVSSGGGGSGGGGSGGGGSGGGGSDVVMTQSPLSLPVTLGQPASISCKSSQSLLDSDGKTYLNWLQQRPGQSPRRLISLVSKLDSGVPDRFSGSGSGTDFTLKISRVEAEDVGVYYCWQGTHFPGTFGGGTKVEIKTTTPAPRPPTPAPTIASQPLSLRPEACRPAAGGAVHTRGLDFACDIYIWAPLAGTCGVLLLSLVITLYCKRGRKKLLYIFKQPFMRPVQTTQEEDGCSCRFPEEEEGGCELRVKFSRSADAPAYKQGQNQLYNELNLGRREEYDVLDKRRGRDPEMGGKPRRKNPQEGLYNELQKDKMAEAYSEIGMKGERRRGKGHDGLYQGLSTATKDTYDALHMQALPPR

SEQ ID NO: 1068-1071 - skipped (4 entries)

SEQ ID NO: 1072 - DNA, 1470 bp, Artificial Sequence
  source: /note="Description of Artificial Sequence: Synthetic polynucleotide"
atggccctccctgtcaccgccctgctgcttccgctggctcttctgctccacgccgctcggcccgagattcagctcgtgcaatcgggagcggaagtcaagaagccaggagagtccttgcggatctcatgcaagggtagcggctttaacatcgaggattactacatccactgggtgaggcagatgccggggaagggactcgaatggatgggacggatcgacccagaaaacgacgaaactaagtacggtccgatcttccaaggccatgtgactattagcgccgatacttcaatcaataccgtgtatctgcaatggtcctcattgaaagcctcagataccgcgatgtactactgtgctttcagaggaggggtctactggggacagggaactaccgtgactgtctcgtccggcggaggcgggtcaggaggtggcggcagcggaggaggagggtccggcggaggtgggtccgacgtcgtgatgacccagagccctgacagcctggcagtgagcctgggcgaaagagctaccattaactgcaaatcgtcgcagagcctgctggactcggacggaaaaacgtacctcaattggctgcagcaaaagcctggccagccaccgaagcgccttatctcactggtgtcgaagctggattcgggagtgcccgatcgcttctccggctcgggatcgggtactgacttcaccctcactatctcctcgcttcaagcagaggacgtggccgtctactactgctggcagggaacccactttccgggaaccttcggcggagggacgaaagtggagatcaagaccactaccccagcaccgaggccacccaccccggctcctaccatcgcctcccagcctctgtccctgcgtccggaggcatgtagacccgcagctggtggggccgtgcatacccggggtcttgacttcgcctgcgatatctacatttgggcccctctggctggtacttgcggggtcctgctgctttcactcgtgatcactctttactgtaagcgcggtcggaagaagctgctgtacatctttaagcaacccttcatgaggcctgtgcagactactcaagaggaggacggctgttcatgccggttcccagaggaggaggaaggcggctgcgaactgcgcgtgaaattcagccgcagcgcagatgctccagcctacaagcaggggcagaaccagctctacaacgaactcaatcttggtcggagagaggagtacgacgtgctggacaagcggagaggacgggacccagaaatgggcgggaagccgcgcagaaagaatccccaagagggcctgtacaacgagctccaaaaggataagatggcagaagcctatagcgagattggtatgaaaggggaacgcagaagaggcaaaggccacgacggactgtaccagggactcagcaccgccaccaaggacacctatgacgctcttcacatgcaggccctgccgcctcgg

SEQ ID NO: 1073 - protein, 490 aa, Artificial Sequence
  source: /note="Description of Artificial Sequence: Synthetic polypeptide"
MALPVTALLLPLALLLHAARPEIQLVQSGAEVKKPGESLRISCKGSGFNIEDYYIHWVRQMPGKGLEWMGRIDPENDETKYGPIFQGHVTISADTSINTVYLQWSSLKASDTAMYYCAFRGGVYWGQGTTVTVSSGGGGSGGGGSGGGGSGGGGSDVVMTQSPDSLAVSLGERATINCKSSQSLLDSDGKTYLNWLQQKPGQPPKRLISLVSKLDSGVPDRFSGSGSGTDFTLTISSLQAEDVAVYYCWQGTHFPGTFGGGTKVEIKTTTPAPRPPTPAPTIASQPLSLRPEACRPAAGGAVHTRGLDFACDIYIWAPLAGTCGVLLLSLVITLYCKRGRKKLLYIFKQPFMRPVQTTQEEDGCSCRFPEEEEGGCELRVKFSRSADAPAYKQGQNQLYNELNLGRREEYDVLDKRRGRDPEMGGKPRRKNPQEGLYNELQKDKMAEAYSEIGMKGERRRGKGHDGLYQGLSTATKDTYDALHMQALPPR

SEQ ID NO: 1074-1077 - skipped (4 entries)

SEQ ID NO: 1078 - DNA, 1470 bp, Artificial Sequence
  source: /note="Description of Artificial Sequence: Synthetic polynucleotide"
atggccctccctgtcaccgccctgctgcttccgctggctcttctgctccacgccgctcggcccgacgtggtgatgactcagtcgcctgactcgctggctgtgtcccttggagagcgggccactatcaattgcaagtcatcccagtcgctgctggattccgacgggaaaacctacctcaattggctgcagcaaaaaccgggacagcctccaaagcggctcatcagcctggtgtccaagttggacagcggcgtgccagaccgcttctccggttcgggaagcggtactgatttcacgctgaccatctcatccctccaagcggaggatgtggcagtctactactgttggcagggcacgcattttccgggcacttttggaggagggaccaaggtcgaaatcaagggaggaggtggctcgggcggaggaggctcgggaggaggaggatcaggaggcggtggaagcgagattcaactggtccagagcggcgcagaagtcaagaagccgggtgaatcgctcagaatctcgtgcaaaggatcgggattcaacatcgaggactactacattcactgggtcagacaaatgccgggcaaagggctggaatggatggggaggatcgaccccgaaaacgatgaaaccaagtacggaccaatcttccaagggcacgtgaccatttcggcggacacctcaatcaacactgtgtacctccagtggagctcacttaaggccagcgataccgccatgtactattgcgctttccgcggaggggtgtactggggacagggcactactgtgaccgtgtcatccaccactaccccagcaccgaggccacccaccccggctcctaccatcgcctcccagcctctgtccctgcgtccggaggcatgtagacccgcagctggtggggccgtgcatacccggggtcttgacttcgcctgcgatatctacatttgggcccctctggctggtacttgcggggtcctgctgctttcactcgtgatcactctttactgtaagcgcggtcggaagaagctgctgtacatctttaagcaacccttcatgaggcctgtgcagactactcaagaggaggacggctgttcatgccggttcccagaggaggaggaaggcggctgcgaactgcgcgtgaaattcagccgcagcgcagatgctccagcctacaagcaggggcagaaccagctctacaacgaactcaatcttggtcggagagaggagtacgacgtgctggacaagcggagaggacgggacccagaaatgggcgggaagccgcgcagaaagaatccccaagagggcctgtacaacgagctccaaaaggataagatggcagaagcctatagcgagattggtatgaaaggggaacgcagaagaggcaaaggccacgacggactgtaccagggactcagcaccgccaccaaggacacctatgacgctcttcacatgcaggccctgccgcctcgg

SEQ ID NO: 1079 - protein, 490 aa, Artificial Sequence
  source: /note="Description of Artificial Sequence: Synthetic polypeptide"
MALPVTALLLPLALLLHAARPDVVMTQSPDSLAVSLGERATINCKSSQSLLDSDGKTYLNWLQQKPGQPPKRLISLVSKLDSGVPDRFSGSGSGTDFTLTISSLQAEDVAVYYCWQGTHFPGTFGGGTKVEIKGGGGSGGGGSGGGGSGGGGSEIQLVQSGAEVKKPGESLRISCKGSGFNIEDYYIHWVRQMPGKGLEWMGRIDPENDETKYGPIFQGHVTISADTSINTVYLQWSSLKASDTAMYYCAFRGGVYWGQGTTVTVSSTTTPAPRPPTPAPTIASQPLSLRPEACRPAAGGAVHTRGLDFACDIYIWAPLAGTCGVLLLSLVITLYCKRGRKKLLYIFKQPFMRPVQTTQEEDGCSCRFPEEEEGGCELRVKFSRSADAPAYKQGQNQLYNELNLGRREEYDVLDKRRGRDPEMGGKPRRKNPQEGLYNELQKDKMAEAYSEIGMKGERRRGKGHDGLYQGLSTATKDTYDALHMQALPPR

SEQ ID NO: 1080-1083 - skipped (4 entries)

SEQ ID NO: 1084 - DNA, 1470 bp, Artificial Sequence
  source: /note="Description of Artificial Sequence: Synthetic polynucleotide"
atggccctccctgtcaccgccctgctgcttccgctggctcttctgctccacgccgctcggcccgatgtggtcatgacgcagtcaccactgtccctccccgtgacccttggacagccagcgtcgattagctgcaagtcatcccaatccctgctcgattcggatggaaagacctatctcaactggctgcagcaaagacccggtcagagccctaggagactcatctcgttggtgtcaaagctggacagcggagtgccggaccggttttccggttcgggatcggggacggacttcactctgaagatttcacgggtggaagctgaggatgtgggagtgtactactgctggcagggaacccatttccctggcacttttggcggaggaactaaggtcgaaatcaagggaggaggtggctcgggaggaggcggatcgggcggaggcgggagcggcggaggagggtccgaaatccaacttgtccagtcaggagccgaagtgaagaaaccgggagccaccgtcaaaatcagctgtaagggatcgggattcaatatcgaggactactacatccactgggtgcagcaagctccgggcaaaggactggagtggatggggcgcatcgacccagagaacgacgaaaccaaatacggcccgatcttccaagggcgggtgaccatcaccgcggacacctcaactaacactgtgtacatggagctgagctccctgcgctccgaagatactgcagtctactactgcgccttccgcggtggtgtgtactggggacagggcaccactgtgactgtcagctcgaccactaccccagcaccgaggccacccaccccggctcctaccatcgcctcccagcctctgtccctgcgtccggaggcatgtagacccgcagctggtggggccgtgcatacccggggtcttgacttcgcctgcgatatctacatttgggcccctctggctggtacttgcggggtcctgctgctttcactcgtgatcactctttactgtaagcgcggtcggaagaagctgctgtacatctttaagcaacccttcatgaggcctgtgcagactactcaagaggaggacggctgttcatgccggttcccagaggaggaggaaggcggctgcgaactgcgcgtgaaattcagccgcagcgcagatgctccagcctacaagcaggggcagaaccagctctacaacgaactcaatcttggtcggagagaggagtacgacgtgctggacaagcggagaggacgggacccagaaatgggcgggaagccgcgcagaaagaatccccaagagggcctgtacaacgagctccaaaaggataagatggcagaagcctatagcgagattggtatgaaaggggaacgcagaagaggcaaaggccacgacggactgtaccagggactcagcaccgccaccaaggacacctatgacgctcttcacatgcaggccctgccgcctcgg

SEQ ID NO: 1085 - protein, 490 aa, Artificial Sequence
  source: /note="Description of Artificial Sequence: Synthetic polypeptide"
MALPVTALLLPLALLLHAARPDVVMTQSPLSLPVTLGQPASISCKSSQSLLDSDGKTYLNWLQQRPGQSPRRLISLVSKLDSGVPDRFSGSGSGTDFTLKISRVEAEDVGVYYCWQGTHFPGTFGGGTKVEIKGGGGSGGGGSGGGGSGGGGSEIQLVQSGAEVKKPGATVKISCKGSGFNIEDYYIHWVQQAPGKGLEWMGRIDPENDETKYGPIFQGRVTITADTSTNTVYMELSSLRSEDTAVYYCAFRGGVYWGQGTTVTVSSTTTPAPRPPTPAPTIASQPLSLRPEACRPAAGGAVHTRGLDFACDIYIWAPLAGTCGVLLLSLVITLYCKRGRKKLLYIFKQPFMRPVQTTQEEDGCSCRFPEEEEGGCELRVKFSRSADAPAYKQGQNQLYNELNLGRREEYDVLDKRRGRDPEMGGKPRRKNPQEGLYNELQKDKMAEAYSEIGMKGERRRGKGHDGLYQGLSTATKDTYDALHMQALPPR

SEQ ID NO: 1086-1088 - skipped (3 entries)

SEQ ID NO: 1089 - DNA, 1461 bp, Artificial Sequence
  source: /note="Description of Artificial Sequence: Synthetic polynucleotide"
atggccctccctgtcaccgccctgctgcttccgctggctcttctgctccacgccgctcggcccgagatccagctccaacagagcggagccgaactggtcaaaccgggagcgtcggtgaagttgtcatgcactggatcgggcttcaacatcgaggattactacatccactgggtcaagcaacgcaccgagcaggggctggaatggatcggacggatcgaccccgaaaacgatgaaaccaagtacgggcctatcttccaaggacgggccaccattacggctgacacgtcaagcaataccgtctacctccagctttccagcctgacctccgaggacactgccgtgtactactgcgccttcagaggaggcgtgtactggggaccaggaaccactttgaccgtgtccagcggaggcggtggatcaggaggaggaggctcaggcggtggcggctcgcacatggacgtggtcatgactcagtccccgctgaccctgtcggtggcaattggacagagcgcatccatctcgtgcaagagctcacagtcgctgctggattccgacggaaagacttatctgaactggctgctccaaagaccagggcaatcaccgaaacgccttatctccctggtgtcgaaactcgactcgggtgtgccggatcggtttaccggtagcgggtccggcacggacttcactctccgcatttcgagggtggaagcggaggatctcgggatctactactgttggcagggaacccacttccctgggacttttggaggcggaactaagctggaaatcaagaccactaccccagcaccgaggccacccaccccggctcctaccatcgcctcccagcctctgtccctgcgtccggaggcatgtagacccgcagctggtggggccgtgcatacccggggtcttgacttcgcctgcgatatctacatttgggcccctctggctggtacttgcggggtcctgctgctttcactcgtgatcactctttactgtaagcgcggtcggaagaagctgctgtacatctttaagcaacccttcatgaggcctgtgcagactactcaagaggaggacggctgttcatgccggttcccagaggaggaggaaggcggctgcgaactgcgcgtgaaattcagccgcagcgcagatgctccagcctacaagcaggggcagaaccagctctacaacgaactcaatcttggtcggagagaggagtacgacgtgctggacaagcggagaggacgggacccagaaatgggcgggaagccgcgcagaaagaatccccaagagggcctgtacaacgagctccaaaaggataagatggcagaagcctatagcgagattggtatgaaaggggaacgcagaagaggcaaaggccacgacggactgtaccagggactcagcaccgccaccaaggacacctatgacgctcttcacatgcaggccctgccgcctcgg

SEQ ID NO: 1090 - protein, 487 aa, Artificial Sequence
  source: /note="Description of Artificial Sequence: Synthetic polypeptide"
MALPVTALLLPLALLLHAARPEIQLQQSGAELVKPGASVKLSCTGSGFNIEDYYIHWVKQRTEQGLEWIGRIDPENDETKYGPIFQGRATITADTSSNTVYLQLSSLTSEDTAVYYCAFRGGVYWGPGTTLTVSSGGGGSGGGGSGGGGSHMDVVMTQSPLTLSVAIGQSASISCKSSQSLLDSDGKTYLNWLLQRPGQSPKRLISLVSKLDSGVPDRFTGSGSGTDFTLRISRVEAEDLGIYYCWQGTHFPGTFGGGTKLEIKTTTPAPRPPTPAPTIASQPLSLRPEACRPAAGGAVHTRGLDFACDIYIWAPLAGTCGVLLLSLVITLYCKRGRKKLLYIFKQPFMRPVQTTQEEDGCSCRFPEEEEGGCELRVKFSRSADAPAYKQGQNQLYNELNLGRREEYDVLDKRRGRDPEMGGKPRRKNPQEGLYNELQKDKMAEAYSEIGMKGERRRGKGHDGLYQGLSTATKDTYDALHMQALPPR

SEQ ID NO: 1091-1094 - skipped (4 entries)

SEQ ID NO: 1095 - DNA, 1452 bp, Artificial Sequence
  source: /note="Description of Artificial Sequence: Synthetic polynucleotide"
atggccctccctgtcaccgccctgctgcttccgctggctcttctgctccacgccgctcggcccgatatccaaatgactcagagcccttcatccctgagcgccagcgtcggagacagggtgaccatcacgtgccgggcatcccaaggcattagaaataacttggcgtggtatcagcaaaaaccaggaaaggccccgaagcgcctgatctacgcggcctccaaccttcagtcaggagtgccctcgcgcttcaccgggagcggtagcggaactgagtttacccttatcgtgtcgtccctgcagccagaggacttcgcgacctactactgcctccagcatcactcgtacccgttgacttcgggaggcggaaccaaggtcgaaatcaaacgcactggctcgacgtcagggtccggtaaaccgggatcgggagaaggatcggaagtccaagtgctggagagcggaggcggactcgtgcaacctggcgggtcgctgcggctcagctgtgccgcgtcgggttttactttcagctcgtacgctatgtcatgggtgcggcaggctccgggaaaggggctggaatgggtgtccgctatttccggctcgggtggaagcaccaattacgccgactccgtgaagggacgcttcaccatctcacgggataactccaagaatactctgtacctccagatgaactcgctgagagccgaggacaccgcagtgtactactgcgcagggtcaagcggctggtccgaatactggggacagggcaccctcgtcactgtcagctccaccactaccccagcaccgaggccacccaccccggctcctaccatcgcctcccagcctctgtccctgcgtccggaggcatgtagacccgcagctggtggggccgtgcatacccggggtcttgacttcgcctgcgatatctacatttgggcccctctggctggtacttgcggggtcctgctgctttcactcgtgatcactctttactgtaagcgcggtcggaagaagctgctgtacatctttaagcaacccttcatgaggcctgtgcagactactcaagaggaggacggctgttcatgccggttcccagaggaggaggaaggcggctgcgaactgcgcgtgaaattcagccgcagcgcagatgctccagcctacaagcaggggcagaaccagctctacaacgaactcaatcttggtcggagagaggagtacgacgtgctggacaagcggagaggacgggacccagaaatgggcgggaagccgcgcagaaagaatccccaagagggcctgtacaacgagctccaaaaggataagatggcagaagcctatagcgagattggtatgaaaggggaacgcagaagaggcaaaggccacgacggactgtaccagggactcagcaccgccaccaaggacacctatgacgctcttcacatgcaggccctgccgcctcgg

SEQ ID NO: 1096 - protein, 484 aa, Artificial Sequence
  source: /note="Description of Artificial Sequence: Synthetic polypeptide"
MALPVTALLLPLALLLHAARPDIQMTQSPSSLSASVGDRVTITCRASQGIRNNLAWYQQKPGKAPKRLIYAASNLQSGVPSRFTGSGSGTEFTLIVSSLQPEDFATYYCLQHHSYPLTSGGGTKVEIKRTGSTSGSGKPGSGEGSEVQVLESGGGLVQPGGSLRLSCAASGFTFSSYAMSWVRQAPGKGLEWVSAISGSGGSTNYADSVKGRFTISRDNSKNTLYLQMNSLRAEDTAVYYCAGSSGWSEYWGQGTLVTVSSTTTPAPRPPTPAPTIASQPLSLRPEACRPAAGGAVHTRGLDFACDIYIWAPLAGTCGVLLLSLVITLYCKRGRKKLLYIFKQPFMRPVQTTQEEDGCSCRFPEEEEGGCELRVKFSRSADAPAYKQGQNQLYNELNLGRREEYDVLDKRRGRDPEMGGKPRRKNPQEGLYNELQKDKMAEAYSEIGMKGERRRGKGHDGLYQGLSTATKDTYDALHMQALPPR
